(19) United States
(12) Patent Application Publication
(10) Pub. No.: US 2022/0010288 A1
(43) Pub. Date: Jan. 13, 2022

(54) PROTEIN-BASED PURIFICATION MATRICES AND METHODS OF USING THE SAME

(71) Applicant: Isolere Bio, Inc., Durham, NC (US)

(72) Inventors: Kelli M. LUGINBUHL, Durham, NC (US); Michael DZURICKY, Durham, NC (US)

(21) Appl. No.: 17/493,938

(22) Filed: Oct. 5, 2021

Related U.S. Application Data
(63) Continuation of application No. PCT/US2021/018805, filed on Feb. 19, 2021.
(60) Provisional application No. 62/978,615, filed on Feb. 19, 2020.

(51) Int. Cl. C12N 7/00; C07K 14/78; C07K 14/705

(52) U.S. Cl. CPC C12N 7/00; C07K 14/78; C07K 2319/00; C12N 2740/15051; C07K 14/705

(57) ABSTRACT

Provided herein are protein-based purification matrices and methods of use thereof to purify biologics and/or to remove contaminants from a composition. Methods of bringing two or more biologics in close proximity are also provided. The disclosed compositions and methods allow for faster, more efficient purification of a biologic compared to traditional affinity chromatography.

### CROSS-REFERENCE TO RELATED APPLICATIONS

[0001] This application is a continuation of International Patent Application No. PCT/US2021/018805, filed Feb. 19, 2021, which claims the benefit of priority to U.S. Provisional Application No. 62/978,615, filed Feb. 19, 2020, the contents of which are incorporated by reference herein in their entirety.

### DESCRIPTION OF THE TEXT FILE SUBMITTED ELECTRONICALLY

[0002] The contents of the text file submitted electronically herewith are incorporated herein by reference in their entirety: A computer readable format copy of the Sequence Listing (filename: ISOL_002_01US_SeqList_ST25.txt, date recorded: Sep. 30, 2021; file size: ˜1.24 megabyte).

### FIELD

[0003] The present disclosure is generally related to compositions and methods for purification of biologics. More specifically, the present disclosure relates to protein-based purification matrices, and methods of using the same.

### BACKGROUND

[0004] The use of biologics in medicine and other disciplines is rapidly increasing. Biologics often have high affinity and specificity for a given target, as well as low toxicity and biodegradability. However, their manufacturing and purification can be quite difficult. Biologics, including therapeutic enzymes, antibodies, gene delivery vectors, and other fusion proteins, are typically manufactured recombinantly in bacteria, yeast, or mammalian host cells. Numerous downstream purification steps are then required in order to meet acceptable standards of purity (e.g., standards set by the FDA or other regulatory bodies). Host cell proteins, nucleic acids, endotoxins, and viruses are often the main contaminants that must be removed from biologic preparations.

[0005] One commonly used method of purification is affinity chromatography. For example, during antibody manufacture, affinity capture with Protein A chromatography is often the first step after clarification of the cell culture harvest. While affinity chromatography achieves high levels of purity (>90%) due to its selectivity for the target biologic, it is expensive, time consuming, and requires technical equipment that is expensive to maintain and requires skilled labor. It is also difficult to scale because conditions are not linear as column diameters become large.

[0006] There is a need in the art for improved compositions and methods for rapidly and cost-effectively purifying biologics.

### SUMMARY

[0007] The present disclosure provides protein-based purification matrices for purifying biologics, and methods for using the same.

[0008] In some embodiments, the disclosure provides a method for purifying a biologic, the method comprising contacting the biologic with a protein-based purification matrix; wherein the biologic binds to the purification matrix to form a complex; wherein the size of the complex is increased by a first environmental factor; wherein the complex is separated from at least one contaminant on the basis of size; and wherein the biologic is separated from the purification matrix by a second environmental factor.

[0009] In some embodiments, the disclosure provides a method for removing a contaminant from a composition comprising a biologic, the method comprising contacting the contaminant with a protein-based purification matrix; wherein the contaminant binds to the matrix to form a complex; wherein the size of the complex is increased by a first environmental factor; wherein the complex is separated from the biologic on the basis of size; and wherein the contaminant is separated from the matrix by a second environmental factor.

[0010] In some embodiments, the disclosure provides a method for purifying a biologic, the method comprising contacting the biologic with a protein-based purification matrix; wherein the biologic binds to the matrix to form a complex; wherein the size of the complex is increased; wherein the complex is separated from at least one contaminant on the basis of size; and wherein the biologic is separated from the matrix by an environmental factor.

[0011] In some embodiments, the disclosure provides a method for separating a first biologic from a second biologic, the method comprising contacting the first biologic with a first protein-based purification matrix and contacting the second biologic with a second protein-based purification matrix; wherein the first biologic binds to the first purification matrix to form a first complex; wherein the second biologic binds to the second purification matrix to form a second complex; and separating the first biologic from the second biologic by applying an environmental factor.

[0012] In some embodiments, the disclosure provides a method of bringing a first biologic into proximity with a second biologic, the method comprising contacting the first biologic with a first protein-based purification matrix and contacting the second biologic with a second protein-based purification matrix; wherein the first biologic binds to the first purification matrix to form a first complex; wherein the second biologic binds to the second purification matrix to form a second complex; and wherein an environmental factor brings the first complex and the second complex into proximity with one another.

[0013] In some embodiments, the purification matrices described herein comprise (i) a capture domain which binds to the biologic, and (ii) a polypeptide with phase behavior, wherein the capture domain is coupled to the polypeptide with phase behavior. In some embodiments, the purification matrices comprise (i) a capture domain which binds to the contaminant, and (ii) a polypeptide with phase behavior, wherein the capture domain is coupled to the polypeptide with phase behavior.

[0014] In some embodiments, the capture domain is coupled to the polypeptide with phase behavior via a linker. In some embodiments, the linker is a peptide linker. In some embodiments, the peptide linker comprises a protease cleavage site. In some embodiments, the linker is a chemical linker.

[0015] In some embodiments, the purification matrix comprises a fusion protein comprising (i) a capture domain which binds to the biologic and (ii) a polypeptide with phase behavior. In some embodiments, the purification matrix comprises a fusion protein comprising (i) a capture domain which binds to the contaminant and (ii) a polypeptide with phase behavior.

[0016] In some embodiments, the polypeptide with phase behavior is a resilin-like polypeptide.

[0017] In some embodiments, the polypeptide with phase behavior is an elastin-like polypeptide.

[0018] In some embodiments, the polypeptide with phase behavior is a polymer containing a pentapeptide repeat having the sequence (Val-Pro-Gly-Xaa-Gly)ₙ (SEQ ID NO: 10), or a randomized, scrambled analog thereof; wherein Xaa can be any amino acid except proline. In some embodiments, n is an integer from 1 to 360, inclusive of endpoints.

[0019] In some embodiments, the polypeptide with phase behavior comprises an amino acid sequence selected from: (GRGDSPY)ₙ (SEQ ID NO: 1); (GRGDSPH)ₙ (SEQ ID NO: 2); (GRGDSPV)ₙ (SEQ ID NO: 3); (GRGDSPYG)ₙ (SEQ ID NO: 4); (RPLGYDS)ₙ (SEQ ID NO: 5); (RPAGYDS)ₙ (SEQ ID NO: 6); (GRGDSYP)ₙ (SEQ ID NO: 7); (GRGDSPYQ)ₙ (SEQ ID NO: 8); (GRGNSPYG)ₙ (SEQ ID NO: 9); (GVGVP)ₙ (SEQ ID NO: 11); (GVGVPGLGVPGVGVPGLGVPGVGVP)ₘ (SEQ ID NO: 12); (GVGVPGVGVPGAGVPGVGVPGVGVP)ₘ (SEQ ID NO: 13); (GVGVPGWGVPGVGVPGWGVPGVGVP)ₘ (SEQ ID NO: 14); (GVGVPGVGVPGVGVPGVGVPGVGVPGVGVPGEGVPGFGVPGVGVP)ₘ (SEQ ID NO: 15); (GVGVPGVGVPGVGVPGVGVPGVGVPGVGVPGKGVPGFGVPGVGVP)ₘ (SEQ ID NO: 16); and (GAGVPGVGVPGAGVPGVGVPGAGVP)ₘ (SEQ ID NO: 17); or a randomized, scrambled analog thereof; wherein: n is 20-360; and m is 4-25. In some embodiments, the he polypeptide with phase behavior comprises an amino acid sequence selected from: (GVGVP)ₘ (SEQ ID NO: 52); (ZZPXXXXGZ)ₘ (SEQ ID NO: 57); (ZZPXGZ)ₘ (SEQ ID NO: 58); (ZZPXXGZ)ₘ (SEQ ID NO: 59); or (ZZPXXXGZ)ₘ (SEQ ID NO: 60); wherein m is an integer between 10 and 160, inclusive of endpoints, wherein X if present is any amino acid except proline or glycine, and wherein Z if present is any amino acid. In some embodiments, the polypeptide with phase behavior comprises an amino acid sequence of (GVGVPGVGVPGAGVPGVGVPGVGVP)ₘ (SEQ ID NO: 53) or (GVGVPGVGVPGLGVPGVGVPGVGVP)ₘ (SEQ ID NO: 55); wherein m is an integer between 2 and 32, inclusive of endpoints. In some embodiments, the polypeptide with phase behavior comprises an amino acid sequence selected from: (GVGVPGVGVPGAGVPGVGVPGVGVP)ₘ (SEQ ID NO: 53), wherein m is 8 or 16; (GVGVPGAGVP)ₘ (SEQ ID NO: 54), wherein m is an integer between 5 and 80, inclusive of endpoints; or (GXGVP)ₘ (SEQ ID NO: 56), wherein m is an integer between 10 and 160, inclusive of endpoints, and wherein X for each repeat is independently selected from the group consisting of glycine, alanine, valine, isoleucine, leucine, phenylalanine, tyrosine, tryptophan, lysine, arginine, aspartic acid, glutamic acid, and serine.

[0020] In some embodiments, the capture domain comprises the sequence of any one of SEQ ID NO: 24-49, 62-148, and 167-171, or a sequence having at least 1, at least 2, at least 3, at least 4, or at least 5 mutations relative thereto.

[0021] In some embodiments, the binding of a biologic to the purification matrix is reversible. In some embodiments, the binding of a biologic to the purification matrix is non-covalent. In some embodiments, the binding of a biologic to the purification matrix is covalent.

[0022] In some embodiments, the binding of a contaminant to the purification matrix is reversible. In some embodiments, the binding of a contaminant to the purification matrix is non-covalent. In some embodiments, the binding of a contaminant to the purification matrix is covalent.

[0023] In some embodiments, the biologic is a lipid, a lipopolysaccharide, a cell, a protein, a nucleic acid, a carbohydrate, or a virus.

[0024] In some embodiments, the biologic is a cell. In some embodiments, the cell is a bacterial cell, a yeast cell, or a mammalian cell. In some embodiments, the cell is a stem cell, a bone cell, a blood cell, a muscle cell, a fat cell, a skin cell, a nerve cell, an endothelial cell, a sex cell, a pancreatic cell, or a cancer cell. In some embodiments, the cell is an immune cell. In some embodiments, the immune cell is a T cell, a B cell, a NK cell, a peripheral blood mononuclear cell, or a neutrophil. In some embodiments, the cell is a T cell expressing a chimeric antigen receptor (CAR).

[0025] In some embodiments, the nucleic acid is a DNA or an RNA.

[0026] In some embodiments, the virus is an adenovirus, an adeno-associated virus (AAV), a lentivirus, a retrovirus, a poxvirus or a herpesvirus.

[0027] In some embodiments, the biologic has a diameter between 1 nm and 100 μm, inclusive of the endpoints. In some embodiments, the biologic has a diameter between 1 nm and 100 nm, inclusive of the endpoints. In some embodiments, the biologic has a diameter between 100 nm and 1 μm, inclusive of the endpoints. In some embodiments, the biologic has a diameter between 1 μm and 50 μm, inclusive of the endpoints. In some embodiments, the biologic has a diameter between 50 μm and 100 μm, inclusive of the endpoints.

[0028] In some embodiments, the methods of the disclosure are completed in about 0.5 hours to about 24 hours. In some embodiments, the methods of the disclosure are completed in about 0.5 hours to about 8 hours. In some embodiments, the methods of the disclosure are completed in about 2 hours to about 6 hours.

[0029] In some embodiments, the separation of the complex from the at least one contaminant can be observed visually with an unaided eye.

[0030] In some embodiments, the increase in size of the complex is at least a 2-fold increase. In some embodiments, the increase in size of the complex is at least a 10-fold increase. In some embodiments, the increase in size of the complex is at least a 25-fold increase. In some embodiments, the increase in size is an increase in the mass of the complex. In some embodiments, the increase in size is an increase in the diameter of the complex.

[0031] In some embodiments, the environmental factor comprises one or more of: a change in one or more of temperature, pH, salt concentration, concentration of the purification matrix, concentration of the biologic, or pressure; the addition of one or more surfactants, molecular crowding agents, reducing agents, oxidizing agents, enzymes, or denaturing agents; or the application of electromagnetic or acoustic waves. In some embodiments, the environmental factor is the first and/or second environmental factor.

[0032] In some embodiments, the separation on the basis of size is performed using tangential flow filtration, membrane chromatography, analytical ultracentrifugation, high performance liquid chromatography, membrane chromatography, and/or fast protein liquid chromatography.

[0033] In some embodiments, the contaminant is selected from a solvent, an endotoxin, a protein, a peptide, a nucleic acid, and a carbohydrate.

[0034] In some embodiments, the purification yield of the biologic is at least 70%, at least 80%, at least 90%, at least 95%, at least 96%, at least 97%, at least 98%, or at least 99%. In some embodiments, the biologic is purified to at least 70%, at least 80%, at least 90%, at least 95%, at least 96%, at least 97%, at least 98%, or at least 99% purity.

[0035] In some embodiments, provided herein is a method of increasing yield of a biologic during production thereof, the method comprising culturing biologic-producing cells in the presence of a purification matrix. In some embodiments, the biologic reversibly binds to the purification matrix to form a complex. In some embodiments, the purification matrix is present at a concentration of at least about 10 μM.

[0036] In some embodiments, provided herein is a method of stabilizing a biologic during production thereof, the method comprising culturing biologic-producing cells in the presence of a purification matrix. In some embodiments, the biologic reversibly binds to the purification matrix to form a complex. In some embodiments, the purification matrix is present at a concentration of at least about 10 μM.

[0037] In some embodiments, provided herein is a method of stabilizing a biologic during purification thereof, the method comprising contacting the biologic with a purification matrix during purification thereof. In some embodiments, the biologic reversibly binds to the purification matrix to form a complex. In some embodiments, the purification matrix is present at a concentration of at least about 10 μM.

[0038] In some embodiments, provided herein is a method of stabilizing a biologic during storage thereof, the method comprising storing the biologic in the presence of a purification matrix.

[0039] In some embodiments, provided herein is a method of increasing the shelf-life of a biologic, the method comprising storing the biologic in the presence of a purification matrix. In some embodiments, the biologic reversibly binds to the purification matrix to form a complex. In some embodiments, the purification matrix is present at a concentration of at least about 10 μM.

[0040] These and other embodiments will be further described below in the Detailed Description, Examples, and Claims.

### BRIEF DESCRIPTION OF THE DRAWINGS

[0041] FIG. 1 is a graph that shows the tangential flow filtration flux and transmembrane pressure during the separation of an AAV9-purification matrix complex from impurities. The purification matrix can efficiently purify AAV9 particles with tangential flow filtration (TFF) in concentration-diafiltration-concentration-diafiltration (CDCD) mode. The process is performed at high flux and with a low and stable transmembrane pressure (TMP) in permeate-control mode.

[0042] FIG. 2 is a western blot, which shows the presence or absence of VP1, VP2, and VP3 proteins of AAV, at different steps of the tangential flow filtration (TFF) process. The first lane, labeled SM (starting material) shows the presence of AAV particles in the starting material. The SM is supernatant from cultured HEK293 cells producing a recombinant AAV9 vector packaging a tdTomato transgene that is treated with 10 U/mL benzonase and 0.01% pluronic acid. The second lane, labeled C (P), shows the absence of AAV particles in the permeate. The third lane, labeled C (R), shows the presence of AAV particles in the retentate. The fourth lane, labeled W(P), shows the absence of AAV particles in the wash containing removed contaminants. The fifth lane, labeled E(P), shows the eluted AAV particles.

[0043] FIG. 3 is a graph showing quantitation of contaminant host cell proteins (HCP) within a composition containing an AAV-purification matrix complex during TFF concentration and diafiltration. The composition containing the AAV-purification matrix complex is referred to as SM or “starting material” and contains AAV9 particles. Throughout the concentration and diafiltration stages of TFF, 1 mL fractions are collected. DV1, DV2, DV3-4, DV5-6, DV7-8, and DV9-10 refer to fractions collected during the concentration stage of TFF. W1-2, W3-4, and W5-6 refer to fractions collected during the washing stage of diafiltration. EC, E1, E2, E3, and E4 refer to fractions collected during the elution stage of diafiltration.

[0044] FIG. 4 is a graph showing the concentration of double stranded DNA (dsDNA) impurities in a composition comprising AAV9 particles before purification with a purification matrix (referred to as starting material (SM)) and after purification with a purification matrix (referred to as “elution”).

[0045] FIG. 5 is a graph that shows a purification matrix's efficiency in capturing AAV particles (AAV Capture Efficiency) after clarification and/or treatment with nuclease. The compositions comprising AAV8 particles included compositions from the cell lysate of HEK293 cells producing AAV8 particles, referred to as “lysate,” and compositions comprising media harvested from HEK293 cells producing AAV8 particles, referred to as “supernatant”. The compositions contained viral titers of 1×10⁷ viral particles per microliter (vp/uL) (referred to as “E7”), 1×10⁸ vp/uL (“E8”), or 1×10¹⁰ vp/uL (“E10”). The compositions were clarified (+) or not clarified (−). The compositions were exposed to nuclease (+) or not exposed to nuclease (−). A purification matrix was used to capture AAV8 particles from each composition. The AAV Capture Efficiency for each sample was calculated using the following equation: 100×(# of AAV8 particles captured by the purification matrix/# of AAV8 particles in the composition before purification).

[0046] FIG. 6 provides an image of a silver stained SDS-PAGE gel, which shows that purification of AAV8 particles with purification matrix yields highly pure AAV8 particles, regardless of pre-treatment with benzonase nuclease. (−) indicates no pre-treatment with benzonase nuclease was performed, and (+) indicates that pre-treatment was performed. The first lane shows molecular weight markers (kDa).

[0047] FIG. 7 is a graph that shows dsDNA concentration in AAV8 samples with (+) or without (−) benzonase nuclease pre-treatment. With or without pre-treatment, the compositions comprising purified AAV8 eluted from the purification matrix had similar levels of dsDNA, as assessed by Quant-iT picogreen assay. Lysed SM: starting material comprised of clarified cell lysate; Capture: purification matrix capture step supernatant; Elution: purification matrix elution step supernatant.

[0048] FIG. 8 shows AAV Capture Efficiency after centrifugation at various speeds. The figure shows that >95% capture of AAV8 particles is achieved using centrifugation speeds at or greater than 500 relative centrifugal force (RCF), including 3500 and 16000 RCF.

[0049] FIG. 9 shows a comparison of the AAV2 titers produced by HEK293 cell cultures under standard conditions (control) or with the addition of purification matrix as quantified by inverted terminal repeat (ITR) quantitative polymerase chain reaction (qPCR) The data shows that the presence of purification matrix may increase titers by 8% or more. Student's t-test, p=0.077.

[0050] FIG. 10 shows the percent change of total AAV8 capsids after repeated freeze-thaw cycles in a composition comprising AAV8 particles and purification matrix and a composition comprising AAV8 particles and PBS (negative control).

[0051] FIG. 11 is a graph showing the effect of purification matrix concentration on the Capture Efficiency of AAV8 particles. The Capture Efficiency was calculated using the following equation: 100×(# of AAV8 particles captured by the purification matrix/# of AAV8 particles in the composition before purification).

[0052] FIG. 12 is a graph showing the effect of purification matrix concentration on the Capture Efficiency of Ad5 particles. The Capture Efficiency was calculated using the following equation: 100×(# of Ad5 particles captured by the purification matrix/# of Ad5 particles in the composition before purification).

[0053] FIG. 13 shows fluorescent images of HEK293 cells incubated with the supernatant of a composition comprising lentivirus particles and phosphate-buffered saline (PBS), labeled LV-GFP control (left) or HEK293 cells incubated with the supernatant of a composition comprising lentivirus particles and purification matrix, labeled LV-GFP with Purification Matrix (right).

[0054] FIG. 14 shows an image of an SDS-PAGE gel. The first lane, labeled “0.2 μm (F)”, contains the filtrate of a complex between human serum albumin (HSA) and purification matrix after introduction of an environmental factor (0.6 M NaCl) that is applied to a filter with a 0.2 μm pore size. The second lane, labeled “300 kDa (F)”, contains the filtrate of a complex between human serum albumin (HSA) and purification matrix after introduction of an environmental factor (0.6 M NaCl) that is applied to a filter with a 300 kDa molecular weight cutoff.

[0055] FIG. 15 is a graph showing the ability of Ad5 particles to infect HEK293 cells (“infectivity”) 0, 3, 7, 11 days after incubation with purification matrix, matrix control, and PBS (labeled PBS control).

[0056] FIG. 16 is a graph showing the ability of Ad5 particles to infect HEK293 cells (“infectivity”) incubated with purification matrix or PBS (labeled control) at room temperature (about 25° C.) or 35° C.

[0057] FIG. 17 is a graph showing the ability of Ad5 particles to infect HEK293 cells (“infectivity”) incubated with purification matrix, matrix control, or PBS (labeled control) after three freeze-thaw cycles (−80° C. to room temperature).

[0058] FIG. 18 is an image of SDS-PAGE gels that reveals the presence of IgG1 during tangential flow filtration (TFF) concentration (left), diafiltration (left), and elution (right). The composition containing supernatant of CHO cells expressing IgG1 is referred to as “SM” or starting material. The SM is concentrated via TFF (“Conc”) and incubated with purification matrix “SM+PM” to form a complex. During diafiltration, the complexes are washed with 0.6 M NaCl (labeled “1”-“8”) to remove impurities. The twelfth lane of the SDS-PAGE gel, labeled “wash pool” is a sample from a pool of the wash fractions. IgG1 is eluted from the complex with an elution buffer containing 50 mM sodium citrate, 0.6 M NaCl at a pH of 3. The SDS-PAGE gel on the right shows elution fractions, labeled “1” to “7” and a pool of the elution fractions labeled “elution pool.”

[0059] FIG. 19 shows the flux and transmembrane pressure (TMP) throughout tangential flow filtration (TFF) of a solution containing purification matrix and IgG1.

[0060] FIG. 20 shows a size exclusion chromatograph of a composition containing impure IgG1 (top) and of the pure IgG1 composition after purification via a purification matrix and tangential flow filtration (bottom).

[0061] FIG. 21 shows host cell protein impurities in five different immunoglobulin compositions containing IgG2, IgG1, or IgG4 after purification using a purification matrix of the disclosure and tangential flow filtration as opposed to purification via protein A chromatography. Host cell protein impurities were quantitated by ELISA.

[0062] FIG. 22 shows the productivity of a purification matrix for purifying immunoglobulins as described herein, versus two different protein A resins (Mab Select SuRe™ LX and Amsphere™ A3) (labeled “PrA Chromatography Model 1” and “PrA Chromatography Model 2”). The productivity is calculated according to the following equation: amount of antibody purified (grams)/unit of material (Liters)/time (hours). The material refers to the volume of protein A resin or a purification matrix of the disclosure.

[0063] FIG. 23 shows the percentage of AAV particles captured from cellular supernatant using a purification matrix, as determined by quantitative polymerase chain reaction (qPCR).

[0064] FIG. 24 shows the percentage of AAV particles eluted from the purification matrix, as determined by qPCR, using various elution conditions (e.g., second environmental factors).

[0065] FIG. 25 provides an image of a silver-stained gel containing samples of (1) unpurified cellular supernatant, and (2) a sample comprising AAV particles purified according to the methods of the disclosure. In the sample containing AAV particles, bands for VP1, VP2, and VP3 proteins were observed at the expected sizes (i.e., 87 kDa, 72 kDa, and 62 kDa, respectively).

[0066] FIG. 26 provides an image of a Western Blot, showing that AAV VP1, VP2, and VP3 capsid proteins present in cellular supernatant were successfully captured and removed from the cellular supernatant using a purification matrix described herein.

[0067] FIG. 27A shows pictures of cells infected with a control AAV particle (Pos Ctrl), or an AAV8 particle carrying a tdTomato transgene that was either (i) not purified by the methods of the disclosure (Pos Ctrl) or (ii) purified with a purification matrix of the disclosure (e.g. ViraTag™). Both control AAV and AAV purified with ViraTag™ are infectious. The image labeled “Neg Ctrl” shows cells which were not infected with any AAV particles.

[0068] FIG. 27B shows the fluorescence intensity of cells infected with a control AAV particle (Pos Ctrl) or an AAV particle purified using a purification matrix as described herein (e.g. ViraTag™). Both types of AAV particles tested carried a tdTomato transgene.

### DETAILED DESCRIPTION OF THE INVENTION

### Definitions

[0069] As used herein, and in the appended claims, the singular forms “a”, “an”, and “the” include plural referents unless the context clearly dictates otherwise. Thus, for example, reference to “a protein” can refer to one protein or to mixtures of such protein, and reference to “the method” includes reference to equivalent steps and/or methods known to those skilled in the art, and so forth.

[0070] As used herein, the term “about” or “approximately” when preceding a numerical value indicates the value plus or minus a range of 10%. For example, “about 100” encompasses 90 and 110.

[0071] Also as used herein, “and/or” refers to and encompasses any and all possible combinations of one or more of the associated listed items, as well as the lack of combinations when interpreted in the alternative (“or”).

[0072] Unless the context indicates otherwise, it is specifically intended that the various features described herein can be used in any combination.

[0073] Moreover, the present disclosure also contemplates that in some embodiments, any feature or combination of features set forth herein can be excluded or omitted. To illustrate further, if, for example, the specification indicates that a particular amino acid can be selected from A, G, I, L and/or V, this language also indicates that the amino acid can be selected from any subset of these amino acid(s) for example A, G, I or L; A, G, I or V; A or G; only L; etc., as if each such subcombination is expressly set forth herein. Moreover, such language also indicates that one or more of the specified amino acids can be disclaimed. For example, in particular embodiments the amino acid is not A, G or I; is not A; is not G or V; etc., as if each such possible disclaimer is expressly set forth herein.

[0074] As used herein, the term “protein-based” refers to a composition that comprises a protein or peptide component. For example, a protein-based purification matrix is a purification matrix that comprises a protein or peptide.

[0075] As used herein, the term “environmental factor” is any factor that, when applied to a composition comprising a protein-based purification matrix, alters one or more properties of the composition. Non-limiting examples of environmental factors include a change in one or more of temperature, pH, salt concentration, concentration of the purification matrix, concentration of the biologic, or pressure; the addition of one or more surfactants, molecular crowding agents, denaturing agents, reducing agents, or oxidizing agents; or the application of electromagnetic or acoustic waves.

[0076] As used herein, the term “biologic” may refer to, for example, a protein, a peptide, a carbohydrate, a nucleic acid, a virus, a cell (e.g., a bacterial, yeast, or mammalian cell), a carbohydrate, a lipid, or a lipopolysaccharide.

[0077] As used herein, the term “contaminant” may refer to any substance that is not desired in a purified composition. In some embodiments, the contaminant is any substance other than the biologic desired to be purified. Non-limiting examples of contaminants include, but are not limited to, a solvent, a protein, a peptide, a carbohydrate, a nucleic acid, a virus, a cell (e.g., a bacterial, yeast, or mammalian cell), a carbohydrate, a lipid, or a lipopolysaccharide. In some embodiments, the contaminant is an endotoxin or a mycotoxin.

[0078] An “adeno-associated virus” (AAV) is a small, replication-deficient parvovirus. As used herein, AAV may refer to a wildtype or mutant AAV of any one of the following serotypes: AAV1, AAV2, AAV3 (including types 3A and 3B), AAV4, AAV5, AAV6, AAV7, AAV8, AAV9, AAV10, AAV11, AAV12, AAV13, AAVrh32.33, AAVrh8, AAVrh10, AAVrh74, AAVhu.68, avian AAV, bovine AAV, canine AAV, equine AAV, ovine AAV, snake AAV, bearded dragon AAV, AAV2i8, AAV2g9, AAV-LK03, AAV7m8, AAV Anc80, AAV PHP.B, and any other AAV now known or later discovered. In some embodiments, an AAV may have a single-stranded genome, or a double-stranded genome (e.g., a self-complementary AAV). The “capsid” of an AAV particle is a near-spherical protein shell that comprises individual “capsid protein subunits” or “capsid proteins” (e.g., about 60 capsid protein subunits) associated and arranged with T=1 icosahedral symmetry. Accordingly, the capsids of the AAV vectors described herein comprise a plurality of capsid proteins. An “AAV particle” typically comprises a capsid, and a nucleic acid (e.g., a nucleic acid comprising a transgene) encapsidated by the protein capsid. When an AAV particle is described as comprising a capsid protein, it will be understood that the AAV particle comprises a capsid, wherein the capsid comprises one or more AAV capsid proteins. When an AAV particle is described as binding to a binding domain, it will be understood that the binding domain may bind to one or more capsid proteins within the capsid. The term “empty AAV particle” or “empty capsid” refers to an AAV particle or capsid that does not comprise any vector genome or nucleic acid comprising an expression cassette or transgene.

[0079] A “viral particle” typically comprises a protein shell (e.g., a capsid or an envelope), and a nucleic acid (e.g., a nucleic acid comprising a transgene) contained therein.

[0080] As used herein, the terms “peptide,” “polypeptide,” and “protein” are used interchangeably, and refer to a compound comprised of amino acid residues covalently linked by peptide bonds. A protein must contain at least two amino acids, and no limitation is placed on the maximum number of amino acids that can comprise a protein's sequence. The term “peptide” may refer to a short chain of amino acids including, for example, natural peptides, recombinant peptides, synthetic peptides, or a combination thereof. Proteins and peptides may include, for example, biologically active fragments, substantially homologous polypeptides, oligopeptides, homodimers, heterodimers, variants of polypeptides, modified polypeptides, derivatives, analogs, and fusion proteins, among others.

[0081] A “polynucleotide” is a sequence of nucleotide bases, and may be RNA, DNA or DNA-RNA hybrid sequences (including both naturally occurring and/or non-naturally occurring nucleotides). In some embodiments, a polynucleotide is either a single or double stranded DNA sequence.

[0082] As used herein, by “isolate” or “purify” (or grammatical equivalents) a biologic, it is meant that the biologic is at least partially separated from at least some of the other components in a starting material comprising the biologic (e.g., a cell lysate). In representative embodiments an “isolated” or “purified” biologic is enriched by at least about 10-fold, about 100-fold, about 1000-fold, about 10,000-fold or more as compared with the starting material.

[0083] As used herein, the term “polypeptide with phase behavior” refers to any polypeptide that is capable of undergoing a phase transition. In some embodiments, the polypeptide undergoes a phase transition due to the application of an environmental factor. Exemplary polypeptides with phase behavior include elastin-like polypeptides (ELPs) and resilin-like polypeptides (RLPs).

[0084] As used herein, the term “fusion protein” refers to a polypeptide produced when two heterologous nucleotide sequences or fragments thereof coding for two (or more) different polypeptides not found fused together in nature are fused together in the correct translational reading frame.

[0085] As used herein, the term “capture domain” may refer to any amino acid sequence (protein, peptide, etc.) which binds to a target biologic. In some embodiments, the capture domain may comprise a full-length, truncated, or modified version of a receptor for the target biologic. In some embodiments, the capture domain may be an antigen-binding portion of a monoclonal antibody (e.g., a Fab), a single-chain variable fragment (scFv) derived from a monoclonal antibody; a natural ligand of the target biologic; a peptide with sufficient affinity for the target; a single domain binder such as a camelid; an artificial binder such as a Darpin; or a single-chain derived from a T-cell receptor.

[0086] As used herein, the term “fragment” as it refers to a protein or polypeptide includes a truncated form of the protein or polypeptide. For example, a fragment of CD4 may include about 1%, about 5%, about 10%, about 15%, about 20%, about 25%, about 30%, about 35%, about 40%, about 45%, about 50%, about 55%, about 60%, about 65%, about 70%, about 75%, about 80%, about 85%, about 90%, about 95%, about 97%, or about 99% of the amino acids of full-length CD4.

[0087] As used herein, the term “capture efficiency” as it relates to a purification matrix described herein refers to the amount of biologic captured by a purification matrix relative to the amount of biologic present in the starting composition. The following equation is used to determine capture efficiency: 100×(amount of biologic captured by the purification matrix/amount of biologic in the composition before purification).

[0088] As used herein, the term “amino acid” encompasses any naturally occurring amino acid, modified forms thereof, and synthetic amino acids. Naturally occurring, levorotatory (L-) amino acids are shown in Table 1.

TABLE 1
Amino acid residues and abbreviations.

| | Abbreviation | |
|---|---|---|
| Amino Acid Residue | Three-Letter Code | One-Letter Code |
| Alanine | Ala | A |
| Arginine | Arg | R |
| Asparagine | Asn | N |
| Aspartic acid (Aspartate) | Asp | D |
| Cysteine | Cys | C |
| Glutamine | Gln | Q |
| Glutamic acid (Glutamate) | Glu | E |
| Glycine | Gly | G |
| Histidine | His | H |
| Isoleucine | Ile | I |
| Leucine | Leu | L |
| Lysine | Lys | K |
| Methionine | Met | M |
| Phenylalanine | Phe | F |
| Proline | Pro | P |
| Serine | Ser | S |
| Threonine | Thr | T |
| Tryptophan | Trp | W |
| Tyrosine | Tyr | Y |
| Valine | Val | V |

[0089] Alternatively, the amino acid can be a modified amino acid residue (nonlimiting examples are shown in Table 2) and/or can be an amino acid that is modified by post-translational modification (e.g., acetylation, amidation, formylation, hydroxylation, methylation, phosphorylation or sulfatation).

TABLE 2
Modified Amino Acid Residues.

| | |
|---|---|
| Modified Amino Acid Residue | Abbreviation |

Amino Acid Residue Derivatives

| | |
|---|---|
| 2-Aminoadipic acid | Aad |
| 3-Aminoadipic acid | bAad |
| beta-Alanine, beta-Aminoproprionic acid | bAla |
| 2-Aminobutyric acid | Abu |
| 4-Aminobutyric acid, Piperidinic acid | 4Abu |
| 6-Aminocaproic acid | Acp |
| 2-Aminoheptanoic acid | Ahe |
| 2-Aminoisobutyric acid | Aib |
| 3-Aminoisobutyric acid | bAib |
| 2-Aminopimelic acid | Apm |
| t-butylalanine | t-BuA |
| Citrulline | Cit |
| Cyclohexylalanine | Cha |
| 2,4-Diaminobutyric acid | Dbu |
| Desmosine | Des |
| 2,21-Diaminopimelic acid | Dpm |
| 2,3-Diaminoproprionic acid | Dpr |
| N-Ethylglycine | EtGly |
| N-Ethylasparagine | EtAsn |
| Homoarginine | hArg |
| Homocysteine | hCys |
| Homoserine | hSer |
| Hydroxylysine | Hyl |
| Allo-Hydroxylysine | aHyl |
| 3-Hydroxyproline | 3Hyp |
| 4-Hydroxyproline | 4Hyp |
| Isodesmosine | Ide |
| allo-Isoleucine | aIle |
| Methionine sulfoxide | MSO |
| N-Methylglycine, sarcosine | MeGly |
| N-Methyl isoleucine | Melte |
| 6-N-Methyllysine | MeLys |
| N-Methylvaline | MeVal |
| 2-Naphthylalanine | 2-Nal |
| Norvaline | Nva |
| Norleucine | Nle |
| Ornithine | Orn |
| 4-Chlorophenylalanine | Phe(4-C1) |
| 2-Fluorophenylalanine | Phe(2-F) |
| 3-Fluorophenylalanine | Phe(3-F) |
| 4-Fluorophenylalanine | Phe(4-F) |
| Phenylglycine | Phg |
| Beta-2-thienylalanine | Thi |

[0090] Further, the non-naturally occurring amino acid can be an “unnatural” amino acid (as described by Wang et al., Annu Rev Biophys Biomol Struct. 35:225-49 (2006)).

### Methods of Using Protein-Based Purification Matrices

[0091] The disclosure provides protein-based purification matrices and methods of using the same. In some embodiments, the protein-based purification matrices comprise a capture domain which binds to a target and a polypeptide with phase behavior, wherein the capture domain is coupled to the polypeptide with phase behavior. Non-limiting examples of targets include biologics and contaminants.

[0092] In some embodiments, a method of purifying a biologic comprises contacting the biologic with a protein-based purification matrix; wherein the biologic binds to the purification matrix to form a complex; wherein the size of the complex is increased by a first environmental factor; wherein the complex is separated from at least one contaminant on the basis of size; and wherein the biologic is separated from the purification matrix by a second environmental factor.

[0093] In some embodiments, a method of purifying a biologic comprises contacting the biologic with a protein-based purification matrix; wherein the biologic binds to the matrix to form a complex; wherein the size of the complex is increased; wherein the complex is separated from at least one contaminant on the basis of size; and wherein the biologic is separated from the matrix by an environmental factor.

[0094] In some embodiments, a method of removing a contaminant from a composition comprising a biologic comprises contacting the contaminant with a protein-based purification matrix; wherein the contaminant binds to the matrix to form a complex; wherein the size of the complex is increased by a first environmental factor; wherein the complex is separated from the biologic on the basis of size; and wherein the contaminant is separated from the matrix by a second environmental factor.

[0095] In some embodiments, a method of separating a first biologic from a second biologic comprises contacting the first biologic with a first protein-based purification matrix and contacting the second biologic with a second protein-based purification matrix; wherein the first biologic binds to the first purification matrix to form a first complex; wherein the second biologic binds to the second purification matrix to form a second complex; and separating the first biologic from the second biologic by applying an environmental factor.

[0096] Also provided herein is a method of bringing a biologic in proximity to another biologic or small molecule. In some embodiments, a method of bringing a first biologic into proximity with a second biologic comprises contacting the first biologic with a first protein-based purification matrix and contacting the second biologic with a second protein-based purification matrix; wherein the first biologic binds to the first purification matrix to form a first complex; wherein the second biologic binds to the second purification matrix to form a second complex; and wherein an environmental factor brings the first complex and second complex into proximity with one another. In some embodiments, a method of bringing a first biologic into proximity with another molecule comprises contacting the first biologic with a first protein-based purification matrix and contacting the molecule with a second protein-based purification matrix; wherein the first biologic binds to the first purification matrix to form a first complex; wherein the molecule binds to the second purification matrix to form a second complex; and wherein an environmental factor brings the first complex and second complex into proximity with one another. In some embodiments, the methods described herein bring a first biologic and a second biologic within about 10 μm, about 5 μm, about 1 μm, about 900 nm, about 800 nm, about 700 nm, about 600 nm, about 500 nm, about 400 nm, about 300 nm, about 200 nm, about 100 nm, about 10 nm, about 1 nm, about 0.5 nm, or about 0.1 nm of one another. In some embodiments, a first biologic and a second biologic are brought into proximity with one another, wherein the first biologic is an enzyme and the second biologic is a substrate thereof.

[0097] In some embodiments, the methods described herein utilize a protein-based purification matrix comprising a capture domain and a polypeptide with phase behavior. In some embodiments, the methods described herein utilize two or more distinct protein-based purification matrices.

[0098] In some embodiments, the methods described herein involve the formation of a complex. In some embodiments, the methods described herein involve the formation of one or more complexes. In some embodiments, the methods described herein involve the formation of one, two, three, four, five, or more complexes. The complexes may be referred to as “first complex” or “second complex,” and so on.

[0099] In some embodiments, a complex comprises a protein-based purification matrix and a biologic. In some embodiments, a complex comprises a protein-based purification matrix and a contaminant. In some embodiments, a complex comprises a protein-based purification matrix and a second protein such as an enzyme substrate, a metabolite, a ligand (e.g., a ligand that binds to a cellular receptor).

[0100] In some embodiments, the components of the complex (e.g. the purification matrix and the contaminant, biologic, and/or other molecule) bind to each other. In some embodiments, the binding is reversible. Reversible binding means that the complexes can dissociate e.g. separate into individual components. For example, if a complex reversibly forms between the purification matrix and a biologic, the purification matrix and the biologic can subsequently disassociate. In some embodiments, dissociation is triggered by an environmental factor. In some embodiments, reversible binding allows for separation of a biologic from the purification matrix. In some embodiments, reversible binding allows for separation of a contaminant from the purification matrix. In some embodiments, reversible binding allows for separation of the other molecule from the purification matrix.

[0101] In some embodiments, reversible binding is non-covalent, i.e. no covalent bonds are formed between the interacting components of the complex (such as between the purification matrix and the contaminant, biologic, and/or other molecule). In some embodiments, non-covalent interactions cause the purification matrix and the contaminant, biologic, and/or other molecule to bind to each other. Non-limiting examples of non-covalent interactions include dipole-dipole forces, van der Waals forces, London Dispersion forces, hydrogen bonding, hydrophobic interactions, and electrostatic interactions. In some embodiments, non-covalent binding is disrupted by the addition of an environmental factor.

[0102] In some embodiments, binding between the purification matrix and a target molecule (e.g., a contaminant, biologic, and/or other molecule) is covalent. In some embodiments, a covalent bond between a purification and a matrix may be cleaved using, for example, a protease.

[0103] In some embodiments, the size of the complexes described herein increase after an environmental factor is applied. In some embodiments, the size of a complex formed between the purification matrix and biologic, contaminant, and/or other molecule increases. In some embodiments, the size of the initial complex increases as a result of aggregation of multiple complexes. In some embodiments, multiple complexes aggregate due to self-assembly of protein-based purification matrices. In some embodiments, multiple complexes aggregate due to the application of an environmental factor. In some embodiments, the size increase is stabilized by non-covalent interactions between multiple protein-based purification matrix molecules. In some embodiments, the size increase is stabilized by non-covalent interactions between the polypeptides with phase behavior. In some embodiments, the non-covalent interactions are dipole-dipole forces, van der Waals forces, London Dispersion forces, hydrogen bonding, hydrophobic interactions, and/or electrostatic interactions.

[0104] In some embodiments, the methods of the disclosure provide for the formation of multiple complexes in a mixture. In some embodiments, the size of all of complexes increase. In some embodiments, the size of some complexes increases, and the size of the other complexes remains constant. In some embodiments, the size of one complex increases, and the size of the other complex remains constant.

[0105] In some embodiments, the size of the initial complex increases by at least about 2-fold, at least about 5-fold, at least about 10-fold, at least about 15-fold, at least about 20-fold, at least about 25-fold, at least about 30-fold, at least about 35-fold, at least about 40-fold, at least about 45-fold, at least about 50-fold, at least about 55-fold, at least about 60-fold, at least about 65-fold, at least about 70-fold, at least about 75-fold, at least about 80-fold, at least about 85-fold, at least about 90-fold, at least about 95-fold, at least about 100-fold, or more. In some embodiments, the size of the initial complex increases by at least about 2-fold. In some embodiments, the size of the initial complex increases by at least about 5-fold. In some embodiments, the size of the initial complex increases by at least about 10-fold. In some embodiments, the size of the initial complex increases by at least about 25-fold.

[0106] As used herein, the phrase “increase in size” may refer to an increase in the diameter of the complex or an increase in the mass of the complex. In some embodiments, the increase in size is an increase in the molar mass of the complex. In some embodiments, the increase in size is an increase in the hydrodynamic radius of the complex.

[0107] In some embodiments, the increase in size of the complex can be observed visually with an unaided eye. For example, the increase in size of the complex may cause a composition comprising the complex to change color, clarity, viscosity, and/or may cause the complex to change solubility (e.g., to precipitate from solution), wherein such change is observable by a human without the use of any special equipment.

[0108] In some embodiments, a person of skill in the art may measure the increase in the size of the complex according to known methods in the art. In some embodiments, the increase in the size of the complex can be measured utilizing a technique selected from the group consisting of x-ray scattering, small angle x-ray scattering, wide angle x-ray scattering, dynamic light scattering, analytical ultracentrifugation, size exclusion chromatography, and photon correlation spectroscopy.

[0109] In some embodiments, the complex of increased size is separated from a biologic, contaminant, and/or small molecule. In some embodiments, the complex of increased size containing a biologic and a protein-based purification matrix is separated from a contaminant. In some embodiments, the complex of increased size containing a contaminant and a protein-based purification matrix is separated from a composition containing a biologic. In some embodiments, the first complex of increased size containing a first biologic and a first protein-based purification matrix is separated from a second complex containing a second biologic and a second protein-based purification matrix.

[0110] In some embodiments, separation of the complex from the biologic, contaminant, and/or small molecule can be observed visually with an unaided eye.

[0111] In some embodiments, separation of the complex from the biologic, contaminant, and/or small molecule is on the basis of size. In some embodiments, the separation on the basis of size is performed using a technique selected from the group consisting of tangential flow filtration (TFF), analytical ultracentrifugation, membrane chromatography, high performance liquid chromatography, size exclusion chromatography, membrane chromatography, normal flow filtration, acoustic wave separation, centrifugation, counterflow centrifugation, and fast protein liquid chromatography. In some embodiments, the complex is separated from at least one impurity on the basis of size using tangential flow filtration. In some embodiments, the complex is separated from at least one impurity on the basis of size using centrifugation. In some embodiments, between about 100 relative centrifugal force (RCF) and about 16,000 RCF, for example, about 500 to about 16,000 RCF, about 1,000 RCF to 16,000 RCF, are applied to separate the complex from at least one impurity. In some embodiments, at least 500 relative centrifugal force (RCF) are applied to separate the complex from at least one impurity, for example, at least about 500 RCF, at least about 600 RCF, at least about 700 RCF, at least about 800 RCF, at least about 900 RCF, at least about 1000 RCF, at least about 2000 RCF, at least about 3000 RCF, at least about 3500 RCF, at least about 4000 RCF, at least about 5000 RCF, at least about 6000 RCF, at least about 7000 RCF, at least about 8000 RCF, at least about 9000 RCF, at least about 10,000 RCF, at least about 11,000 RCF, at least about 12,000 RCF, at least about 13,000 RCF, at least about 14,000 RCF, at least about 15,000 RCF, at least about 16,000 RCF, at least about 17,000 RCF, at least about 18,000 RCF, at least about 19,000 RCF, or at least about 20,000 RCF.

[0112] In some embodiments, separation of the complex from the biologic, contaminant, and/or small molecule on the basis of size is performed using TFF. In some embodiments, TFF may be used to separate the complex from at least one impurity on the basis of size, a process also referred to herein as “diafiltration.” Diafiltration comprises both washing and elution steps. Washing removes impurities contained in the composition comprising the complexes. Elution separates purified biologics from the purification matrix. In some embodiments, the complexes are concentrated using TFF. In some embodiments, TFF may be used to increase the concentration of a complex within a composition, a process also referred to herein as “concentration.”

[0113] Tangential flow filtration employs both microfiltration and ultrafiltration membranes to separate molecules. Microfiltration membranes typically have pore sizes between 0.1 μm and 10 μm. Ultrafiltration membranes typically have smaller pore sizes than microfiltration membranes with pore sizes between 0.001 μm and 0.1 μm. In some embodiments, a membrane with a pore size between about 0.001 μm and about 10 μm is utilized in the methods of the disclosure. In some embodiments, the membrane has a pore size of about 0.001 μm, about 0.01 μm, about 0.05 μm, about 0.1 μm, about 0.2 μm, about 0.3 μm, about 0.4 μm, about 0.5 μm, about 0.6 μm, about 0.7 μm, about 0.8 μm, about 0.9 μm, about 1.0 μm, about 2 μm, about 3 μm, about 4 μm, about 5 μm, about 6 μm, about 7 μm, about 8 μm, about 9 μm, or about 10 μm, including all values and ranges in between thereof. In some embodiments, the membrane has a pore size of about 0.1 μm. In some embodiments, the membrane has a pore size of about 0.2 μm.

[0114] In some embodiments, the membrane is made of hydrophilized poly(vinylildene difluoride) (PVDF), polyetheresulfone (PES), cellulose phosphate, diethylaminoethyl cellulose, polysufone, regenerated cellulose, nylon, cellulose nitrate, cellulose acetate, pegylated PES, modified polyethersulfone, and sulfonated PES, or modified derivatives thereof of the aforementioned materials.

[0115] In TFF, a membrane is placed tangentially to the flow of a fluid mixture to cause the fluid mixture to flow tangentially over a first side of the membrane. At the same time, a fluid media is placed in contact with a second surface of the membrane. A transmembrane pressure is the force that drives fluid through the membrane, carrying along permeable molecules.

[0116] In some embodiments, separation of the complex from the biologic, contaminant, and/or small molecule on the basis of size is performed using TFF with a transmembrane pressure of between about 0.1 bar to about 3 bar. In some embodiments, the transmembrane pressure is about 0.1 bar, about 0.2 bar, about 0.3 bar, about 0.4 bar, about 0.5 bar, about 0.6 bar, about 0.7 bar, about 0.8 bar, about 0.9 bar, about 1.0 bar, about 1.1 bar, about 1.2 bar, about 1.3 bar, about 1.4 bar, about 1.5 bar, about 1.6 bar, about 1.7 bar, about 1.8 bar, about 1.9 bar, about 2.0 bar, about 2.1 bar, about 2.2 bar, about 2.3 bar, about 2.4 bar, about 2.5 bar, about 2.6 bar, about 2.7 bar, about 2.8 bar, about 2.9 bar, or about 3.0 bar, including all values and ranges in between. In some embodiments, the transmembrane pressure is about 1.5 bar.

[0117] In some embodiments, the cross flow rate is tuned to improve the separation of the complexes described herein from the biologic, contaminant, and/or small molecule. The cross flow rate is the rate of solution flow through the feed channel and across the membrane. It provides the force that sweeps away molecules that can restrict filtrate flow. In some embodiments, the cross flow rate is between about 500 L/m²/h and about 2000 L/m²/h. In some embodiments, the cross flow rate is between about 500 L/m²/h, about 600 L/m²/h, about 700 L/m²/h, about 800 L/m²/h, about 900 L/m²/h, about 1000 L/m²/h, about 1100 L/m²/h, about 1200 L/m²/h, about 1300 L/m²/h, about 1400 L/m²/h, about 1500 L/m²/h, about 1600 L/m²/h, about 1700 L/m²/h, about 1800 L/m²/h, about 1900 L/m²/h, or about 2000 L/m²/h, including all values and ranges in between thereof. In some embodiments, the cross flow rate is about 960 L/m²/h. In some embodiments, TFF separation occurs by using a membrane that retains the complex containing the purification matrix and the biologic while passing the contaminant. In some embodiments, a membrane that retains the complex containing the purification matrix and the contaminant while passing the biologic is used. In some embodiments, a membrane that retains the complex containing the purification matrix and the contaminant while passing the biologic is utilized. In some embodiments, a membrane that retains the first complex containing the purification matrix and the first biologic while passing the complex containing the second purification matrix and second biologic is utilized.

[0118] In some embodiments, the methods described herein enable the purification of at least 0.1 kg, at least about 0.2 kg, at least about 0.3 kg, at least about 0.4 kg, at least about 0.5 kg, at least about 0.6 kg, at least about 0.7 kg, at least about 0.8 kg, at least about 0.9 kg, at least about 1 kg, at least about 2 kg, at least about 3 kg, at least about 4 kg, at least about 5 kg, at least about 6 kg, at least about 7 kg, at least about 8 kg, at least about 9 kg, at least about 10 kg, or more of biologic per day, including all values and ranges in between.

[0119] In some embodiments, the methods described herein are completed in about 0.5 hr to about 24 hours. In some embodiments, the methods are completed in about 0.5 hr, about 1 hr, about 2 hr, about 3 hr, about 4 hr, about 5 hr, about 6 hr, about 7 hr, about 8 hr, about 9 hr, about 10 hr, about 11 hr, about 12 hr, about 13 hr, about 14 hr, about 15 hr, about 16 hr, about 17 hr, about 18 hr, about 19 hr, about 20 hr, about 21 hr, about 22 hr, about 23 hr, or about 24 hr. In some embodiments, the methods described herein are completed in about 0.5 hr to about 8 hr. In some embodiments, the methods of the disclosure are completed in about 2 hr to about 6 hr.

[0120] In some embodiments, the purification yield of the biologic is at least 70%, at least 80%, at least 90%, at least 95%, at least 96%, at least 97%, at least 98%, or at least 99%.

[0121] In some embodiments, the biologic is purified to at least 70%, at least 80%, at least 90%, at least 95%, at least 96%, at least 97%, at least 98%, or at least 99% purity.

[0122] In some embodiments, the purified biologic retains its biological activity and/or structure. In some embodiments, the purified biologic has enhanced biological activity.

[0123] In some embodiments, at least 400 g/m² (grams of biologic per m² of filter membrane) are purified per day. In some embodiments, at least 400 g/m², at least 500 g/m², at least 600 g/m², at least 700 g/m², at least 800 g/m², at least 900 g/m², or at least 1000 g/m² of biologic are purified per day. In some embodiments, the biologic is a protein. In some embodiments, the protein is an antibody. In some embodiments, the biologic is a virus, such as an AAV, adenovirus, or lentivirus.

[0124] In some embodiments, at least about 150 g/L (grams of biologic per liters of protein-based purification matrix) are purified per day. In some embodiments, at least about 150 g/L, at least about 200 g/L, at least about 250 g/L, at least about 300 g/L, at least about 350 g/L, at least about 400 g/L, at least about 450 g/L, at least about 500 g/L, at least about 550 g/L, at least about 600 g/L, at least about 650 g/L, at least about 700 g/L, at least about 750 g/L, at least about 800 g/L, at least about 850 g/L, at least about 900 g/L, at least about 950 g/L, or at least about 1000 g/L are purified per day. In some embodiments, the biologic is a protein. In some embodiments, the protein is an antibody. In some embodiments, the biologic is a viral particle, such as an AAV particle.

### Methods for Stabilizing Biologics

[0125] The instant inventors have discovered that the purification matrices described herein may unexpectedly help stabilize biologics during production, purification, and/or storage thereof. As used herein with relation to a biologic, the terms “stabilize” or “stabilizing” refers to the ability of a purification matrix to reduce degradation or aggregation of a biologic sample comprising a plurality of biologic molecules, to prevent biologic molecules from binding other proteins, or to enhance synthesis of a biologic by a producer cell.

[0126] Thus, in some embodiments, a biologic is contacted with a purification matrix during production, purification, or storage thereof. In some embodiments, a method of increasing yield of a biologic during production thereof comprises culturing biologic-producing cells in the presence of a purification matrix. In some embodiments, a method of stabilizing biologic during production thereof comprises culturing biologic-producing cells in the presence of a purification matrix. In some embodiments, a method of stabilizing biologics during purification thereof comprises contacting the biologic with a purification matrix during purification thereof. In some embodiments, a method of stabilizing a biologic during storage thereof comprises storing the biologic in the presence of a purification matrix. In some embodiments, a method of increasing the shelf-life of a biologic comprises storing the biologic in the presence of a purification matrix.

[0127] For example, a purification matrix may be contacted with a biologic during production of the biologic in culture. Biologics such as viral particles and proteins (e.g., monoclonal antibodies), for example, may be produced in production cell lines, such as HEK293 cells. In some embodiments, the production cell lines are transfected with one or more plasmids containing various genes required to produce a biologic. Adding the purification matrix to the biologic-producing cells in culture (e.g., by adding it to the tissue culture media) may increase the yield and/or quality of the biologic obtained during this process. In some embodiments, the purification matrix may be added to the culture at a concentration of about 1 μM to about 1 mM, for example, about 1 μM, about 2 μM, about 3 μM, about 4 μM, about 5 μM, about 6 μM, about 7 μM, about 8 μM, about 9 μM, about 10 μM, about 20 μM, about 30 μM, about 40 μM, about 50 μM, about 60 μM, about 70 μM, about 80 μM, about 90 μM, about 100 μM, about 150 μM, about 200 μM, about 250 μM, about 300 μM, about 350 μM, about 400 μM, about 450 μM, about 500 μM, about 550 μM, about 600 μM, about 650 μM, about 700 μM, about 750 μM, about 800 μM, about 850 μM, about 900 μM, about 950 μM, or about 1 mM, including all values and ranges in between. In some embodiments, the purification matrix is added to culture at a concentration of about 10 μM. In some embodiments, the purification matrix is added to culture at a concentration of about 100 μM. Without being bound by any theory, it is believed that the purification matrix can bind to and/or physically surround the biologic molecules as they are produced, thereby preventing them from binding other proteins. Thus, a protein or viral particle produced by a cultured cell and secreted into culture medium, in the presence of purification matrix, would not be able to re-bind to a receptor on a producer cell. In some embodiments, adding a purification matrix to biologic-producer cell lines in culture may increase the yield of the biologic. For example, adding a purification matrix to a viral-producing cell line in culture, such as a cell line producing lentiviral particles or adenoviral particles, may result in an increase in viral titer obtained by at least 2-fold, at least 3-fold, at least 4-fold, at least 5-fold, at least 6-fold, at least 7-fold, at least 8-fold, at least 9-fold, at least 10-fold, at least 50-fold, at least 100-fold, or more, compared to cells cultured without the purification matrix. Adding a purification matrix to a protein-producing cell line in culture may result in an increase in yield of protein obtained by at least 2-fold, at least 3-fold, at least 4-fold, at least 5-fold, at least 6-fold, at least 7-fold, at least 8-fold, at least 9-fold, at least 10-fold, at least 50-fold, at least 100-fold, or more, compared to cells cultured without the purification matrix.

[0128] As another example, after a purified biologic composition is prepared (using the methods described herein, or other methods known in the art), a purification matrix may be added to the sample before storage (e.g., freezing). Without being bound by any theory, it is believed that the purification matrix can bind to and/or physically surround biologic molecules, thus preventing them from aggregating with other biologic molecules, and also helping to protect them from degradation, particularly during multiple freeze-thaw cycles. Aggregation of biologic molecules may be observed visually by microscopy and/or by a technique selected from the group consisting of x-ray scattering, laser diffraction, analytical ultracentrifugation, dynamic light scattering, nanoparticle tracking analysis, resonant mass measurement, size exclusion chromatography, gel permeation chromatography, light obscuration, and combinations thereof. In some embodiments, the biologic may be frozen and stored in the presence of a purification matrix at temperatures between about −80° C. and about 40° C., for example, about −80° C., about −75° C., about −70° C., about −65° C., about −60° C., about −55° C., about −50° C., about −45° C., about −40° C., about −35° C., about −30° C., about −25° C., about −20° C., about −15° C., about −10° C., about −5° C., about 0° C., about 4° C., about 5° C., about 10° C., about 15° C., about 20° C., about 25° C., about 30° C., about 35° C., or about 40° C.

[0129] In some embodiments, when a biologic is stored in the presence of a purification matrix, the shelf life of the biologic is at least about 10% longer as compared to a sample stored in the absence of purification matrix. For example, in some embodiments, the shelf life is at least about 10%, at least about 20%, at least about 30%, at least about 40%, at least about 50%, at least about 60%, at least about 70%, at least about 80%, at least about 90%, at least about 100%, at least about 150%, at least about 200%, at least about 250%, at least about 300%, at least about 350%, at least about 400%, at least about 450%, or at least about 500% longer than the shelf life of a biologic stored in the absence of a purification matrix at about the same temperature.

[0130] In some embodiments, a biologic is stored at about −80° C. in the presence of a purification matrix. In some embodiments, a biologic is stored at about −20° C. in the presence of a purification matrix. In some embodiments, a biologic is stored at about 4° C. in the presence of a purification matrix. In some embodiments, a biologic is stored at about 37° C. in the presence of a purification matrix. In some embodiments, when a biologic is stored in the presence of a purification matrix at about −80° C., about −20° C., about 4° C., or about 37° C., the shelf life of the biologic is at least about 10% longer than if it was stored in the absence of the purification matrix. For example, the shelf life of the biologic may be at least about 10%, at least about 20%, at least about 30%, at least about 40%, at least about 50%, at least about 60%, at least about 70%, at least about 80%, at least about 90%, at least about 100%, at least about 150%, at least about 200%, at least about 250%, at least about 300%, at least about 350%, at least about 400%, at least about 450%, or at least about 500% longer than the shelf life of the biologic stored in the absence of a purification matrix at the same temperature. As used herein, increased shelf life may refer to an increase in the amount of time a biologic is stored and still retains its function. For example, a viral particle that retains its function shares substantially the same level of infectivity.

### Protein-Based Purification Matrices

### Capture Domains

[0131] The protein-based purification matrices described herein may comprise a capture domain. In some embodiments, the capture domain binds a biologic. Non-limiting examples of biologics include a cell, a lipid, a lipopolysaccharide, a protein, a nucleic acid, a carbohydrate, or a virus.

[0132] In some embodiments, the capture domain binds a cell. In some embodiments, the cell is selected from the group consisting of a bacterial cell, yeast cell, or an animal cell such as a mammalian cell. In some embodiments, the cell is a chicken cell, a mouse cell, a guinea pig cell, a rat cell, a rabbit cell, a goat cell, a horse cell, a sheep cell, a dog cell, a cat cell, or a cow cell. In some embodiments, the cell is a human cell.

[0133] In some embodiments, the cell is a stem cell, a bone cell, a blood cell, a muscle cell, a fat cell, a skin cell, a nerve cell, an endothelial cell, a sex cell, a pancreatic cell, or a cancer cell.

[0134] In some embodiments, the cell is an immune cell. In some embodiments, the immune cell is a T cell, a B cell, a NK cell, a peripheral blood mononuclear cell, monocyte, macrophage, or a neutrophil. In some embodiments, the cell is a T cell expressing a chimeric antigen receptor (CAR).

[0135] In some embodiments, the capture domain binds a protein. In some embodiments, the protein is fibrous, globular, or a membrane protein. In some embodiments, the protein is an antibody.

[0136] In some embodiments, the capture domain binds an antibody or antigen-binding portion of a monoclonal antibody. In some embodiments, the capture domain binds to a fragment crystalline (Fc) region. In some embodiments, the Fc region is part of an antibody or antigen-binding portion of a monoclonal antibody. In some embodiments, the capture is Protein A or Protein G, which are known to bind to a Fc region.

[0137] In some embodiments, the capture domain comprises protein A, or a derivative or fragment thereof. Protein A (see, e.g., Uniprot Accession No. Q70AB8), binds to the Fc region of most immunoglobulins. The amino acid sequence of Protein A is:

(SEQ ID NO: 126)
(M)AAQHDEAQQNAFYQVLNMPNLNADQRNGFIQS
LKDDPSQSANVLGEAKKLNESQAPKADNNFNKEQQ
NAFYEILNMPNLNEEQRNGFIQSLKDDPSQSANLL
SEAKKLNESQAPKADNKFNKEQQNAFYEILHLPNL
NEEQRNGFIQSLKDDPSQSANLLAEAKKLNDAQAP
KADNKFNKEQQNAFYEILHLPNLTEEQRNGFIQSL
KDDPSVSKEILAEAKKLNDAQAPKEEDNNKPGKED
GNKPGKEDGN.

[0138] In some embodiments, the capture domain comprises Protein A having an amino acid sequence of SEQ ID NO: 126 with a mutation of A117G. In some embodiments, the capture domain comprises the B domain of Protein A or a fragment or derivative thereof, having the amino acid sequence of SEQ ID NO: 127. In some embodiments, the capture domain comprises the B domain of Protein A or a fragment or derivative thereof, having the amino acid sequence of SEQ ID NO: 127 with an amino acid mutation of A2G. In some embodiments, the capture domain comprises the C domain of Protein A or a fragment or derivative thereof, having the amino acid sequence of SEQ ID NO: 128. In some embodiments, the capture domain comprises the Z domain of Protein A or a fragment or derivative thereof, having the amino acid sequence of SEQ ID NO: 179. In some embodiments, the capture domain comprises the amino acid sequence of SEQ ID NO: 171 or an amino acid sequence having at least 90%, at least 95%, at least 96%, at least 97%, at least 98%, or at least 99% identity to SEQ ID NO: 171.

[0139] In some embodiments, the capture domain comprising Protein A, or a fragment or derivative thereof, comprises the amino acid sequence of SEQ ID NOs: 126-128 and 171 with at least 1, at least 2, at least 3, at least 4, at least 5, at least 6, at least 7, at least 8, at least 9, at least 10, at least 11, at least 12, at least 13, at least 14, at least 15, at least 16, at least 17, at least 18, at least 19, at least 20, at least 21, at least 22, at least 23, at least 24, at least 25 or more amino acid mutations. In some embodiments, the capture domain comprising Protein A, or fragment or derivative thereof, comprises a sequence with at least 90%, at least 95%, at least 97%, or at least 99% identity to any one of SEQ ID NOs: 126-128 and 171.

[0140] Unless otherwise indicated, sequence identity is determined using the National Center for Biotechnology Information (NCBI)'s Basic Local Alignment Search Tool (BLAST®), available at blast.ncbi.nlm.nih.gov/Blast.cgi. In some embodiments, the sequence identity is calculated over the entire length of the compared sequences. In some embodiments, the sequence identity is calculated over a 20-amino acid, 50-amino acid, 75-amino acid, 100-amino acid, 250-amino acid, 500-amino acid, 750-amino acid, or 1000-amino acid fragment of each compared sequence.

[0141] In some embodiments, the capture domain comprises protein G, or a derivative or fragment thereof. Protein G (see, e.g., Uniprot Accession No. P19909), binds to the Fc region of most immunoglobulins. The amino acid sequence of Protein G is:

(SEQ ID NO: 131)
(M)EKEKKVKYFLRKSAFGLASVSAAFLVGSTVF
AVDSPIEDTPIIRNGGELTNLLGNSETTLALRNE
ESATADLTAAAVADTVAAAAAENAGAAAWEAAAA
ADALAKAKADALKEFNKYGVSDYYKNLINNAKTV
EGVKDLQAQVVESAKKARISEATDGLSDFLKSQT
PAEDTVKSIELAEAKVLANRELDKYGVSDYHKNL
INNAKTVEGVKDLQAQVVESAKKARISEATDGLS
DFLKSQTPAEDTVKSIELAEAKVLANRELDKYGV
SDYYKNLINNAKTVEGVKALIDEILAALPKTDTY
KLILNGKTLKGETTTEAVDAATAEKVFKQYANDN
GVDGEWTYDDATKTFTVTEKPEVIDASELTPAVT
TYKLVINGKTLKGETTTEAVDAATAEKVFKQYAN
DNGVDGEWTYDDATKTFTVTEKPEVIDASELTPA
VTTYKLVINGKTLKGETTTKAVDAETAEKAFKQY
ANDNGVDGVWTYDDATKTFTVTEMVTEVPGDAPT
EPEKPEASIPLVPLTPATPIAKDDAKKDDTKKED
AKKPEAKKEDAKKAETLPTTGEGSNPFFTAAALA
VMAGAGALAVASKRKED.

[0142] In some embodiments, the capture domain comprises the G domain of Protein G or a fragment or derivative thereof, having the amino acid sequence of SEQ ID NO: 132. In some embodiments, the capture domain comprises a fragment of Protein G, having the amino acid sequence of SEQ ID NO: 133.

[0143] In some embodiments, the capture domain comprising Protein G, or a fragment or derivative thereof, comprises the amino acid sequence of SEQ ID NOs: 131-133 with at least 1, at least 2, at least 3, at least 4, at least 5, at least 6, at least 7, at least 8, at least 9, at least 10, at least 11, at least 12, at least 13, at least 14, at least 15, at least 16, at least 17, at least 18, at least 19, at least 20, at least 21, at least 22, at least 23, at least 24, at least 25 or more amino acid mutations. In some embodiments, the capture domain comprising Protein G, or fragment or derivative thereof, comprises a sequence with at least 90%, at least 95%, at least 97%, or at least 99% identity to any one of SEQ ID NOs: 131-133.

[0144] In some embodiments, the capture domain binds to a kappa light chain. In some embodiments, the kappa light chain is part of an antibody or antigen-binding portion of a monoclonal antibody thereof. In some embodiments, the capture domain comprises protein L. Protein L binds to antibodies or antibody binding fragments thereof through interactions with the kappa light chain. The amino acid sequence of Protein L is:

(SEQ ID NO: 129)
(M)KINKKLLMAALAGAIVVGGGANAYAAEEDN
TDNNLSMDEISDAYFDYHGDVSDSVDPVEEEID
EALAKALAEAKETAKKHIDSLNHLSETAKKLAK
NDIDSATTINAINDIVARADVMERKTAEKEEAE
KLAAAKETAKKHIDELKHLADKTKELAKRDIDS
ATTINAINDIVARADVMERKTAEKEEAEKLAAA
KETAKKHIDELKHLADKTKELAKRDIDSATTID
AINDIVARADVMERKLSEKETPEPEEEVTIKAN
LIFADGSTQNAEFKGTFAKAVSDAYAYADALKK
DNGEYTVDVADKGLTLNIKFAGKKEKPEEPKEE
VTIKVNLIFADGKTQTAEFKGTFEEATAKAYAY
ADLLAKENGEYTADLEDGGNTINIKFAGKETPE
TPEEPKEEVTIKVNLIFADGKIQTAEFKGTFEE
ATAKAYAYANLLAKENGEYTADLEDGGNTINIK
FAGKETPETPEEPKEEVTIKVNLIFADGKTQTA
EFKGTFEEATAEAYRYADLLAKVNGEYTADLED
GGYTINIKFAGKEQPGENPGITIDEWLLKNAKE
EAIKELKEAGITSDLYFSLINKAKTVEGVEALK
NEILKAHAGEETPELKDGYATYEEAEAAAKEAL
KNDDVNNAYEIVQGADGRYYYVLKIEVADEEEP
GEDTPEVQEGYATYEEAEAAAKEALKEDKVNNA
YEVVQGADGRYYYVLKIEDKEDEQPGEEPGENP
GITIDEWLLKNAKEDAIKELKEAGISSDIYFDA
INKAKTVEGVEALKNEILKAHAEKPGENPGITI
DEWLLKNAKEAAIKELKEAGITAEYLFNLINKA
KTVEGVESLKNEILKAHAEKPGENPGITIDEWL
LKNAKEDAIKELKEAGITSDIYFDAINKAKTIE
GVEALKNEILKAHKKDEEPGKKPGEDKKPEDKK
PGEDKKPEDKKPGEDKKPEDKKPGKTDKDSPNK
KKKAKLPKAGSEAEILTLAAAALSTAAGAYVSL
KKRK.

[0145] In some embodiments, the capture domain comprises a fragment of Protein L having an amino acid sequence of SEQ ID NO: 130.

[0146] In some embodiments, the capture domain comprising Protein L, or a fragment or derivative thereof, comprises the amino acid sequence of SEQ ID NOs: 129-130 with at least 1, at least 2, at least 3, at least 4, at least 5, at least 6, at least 7, at least 8, at least 9, at least 10, at least 11, at least 12, at least 13, at least 14, at least 15, at least 16, at least 17, at least 18, at least 19, at least 20, at least 21, at least 22, at least 23, at least 24, at least 25 or more amino acid mutations. In some embodiments, the capture domain comprising Protein L, or fragment or derivative thereof, comprises a sequence with at least 90%, at least 95%, at least 97%, or at least 99% identity to any one of SEQ ID NOs: 129-130.

[0147] In some embodiments, the capture domain binds an albumin, or derivative or fusion thereof. In some embodiments, the albumin is human serum albumin (HSA), bovine serum albumin (BSA), or ovalbumin. In some embodiments, the capture domain that binds an albumin comprises albumin-binding polypeptide, or a fragment or derivative thereof. In some embodiments, the albumin-binding polypeptide comprises an amino acid sequence of SEQ ID NO: 125. In some embodiments, the capture domain comprising an albumin-binding polypeptide, or fragment or derivative thereof, comprises the amino acid sequence of SEQ ID NO: 125 with at least 1, at least 2, at least 3, at least 4, at least 5, at least 6, at least 7, at least 8, at least 9, at least 10, at least 11, at least 12, at least 13, at least 14, at least 15, at least 16, at least 17, at least 18, at least 19, at least 20, at least 21, at least 22, at least 23, at least 24, at least 25 or more amino acid mutations. In some embodiments, the capture domain comprising an albumin binding polypeptide, or fragment or derivative thereof, comprises a sequence with at least 90%, at least 95%, at least 97%, or at least 99% identity to SEQ ID NO: 125. In some embodiments, the capture domain that binds to albumin has an amino acid sequence of SEQ ID NO: 170, or an amino acid sequence with at least 90%, at least 95%, at least 96%, at least 97%, at least 98%, or at least 99% identity to SEQ ID NO: 170.

[0148] In some embodiments, the capture domain binds a nucleic acid. In some embodiments, the nucleic acid is a DNA or an RNA. In some embodiments, the nucleic acid is a DNA/RNA hybrid.

[0149] In some embodiments, the capture domain is a protein that binds to a nucleic acid. In some embodiments, the protein that binds to a nucleic acid binds to an adenosine and uridine rich element (ARE) of mRNA, a mRNA cap, a poly(A) tail, RNA, or double stranded DNA.

[0150] In some embodiments, the capture domain comprises mRNA decay activator protein ZFP36L2 (Tis11d), or a fragment or derivative thereof. Tis11d G (see, e.g., Uniprot Accession No. P47974) binds to an ARE. The amino acid sequence of Tis11d is: (M)STTLLSAFYDVDFLCKTEKSLANLNLNNMLDKKAVGTPVAAAPSSGFAPGFLRRHS ASNLHALAHPAPSPGSCSPKFPGAANGSSCGSAAAGGPTSYGTLKEPSGGGGTALLNKE NKFRDRSFSENGDRSQHLLHLQQQQKGGGGSQINSTRYKTELCRPFEESGTCKYGEKCQ FAHGFHELRSLTRHPKYKTELCRTFHTIGFCPYGPRCHFIHNADERRPAPSGGASGDLRA FGTRDALHLGFPREPRPKLHHSLSFSGFPSGHHQPPGGLESPLLLDSPTSRTPPPPSCSSAS SCSSSASSCSSASAASTPSGAPTCCASAAAAAAAALLYGTGGAEDLLAPGAPCAACSSAS CANNAFAFGPELSSLITPLAIQTHNFAAVAAAAYYRSQQQQQQQGLAPPAQPPAPPSATL PAGAAAPPSPPFSFQLPRRLSDSPVFDAPPSPPDSLSDRDSYLSGSLSSGSLSGSESPSLDPG RRLPIFSRLSISDD (SEQ ID NO: 134). The methionine enclosed by parenthesis in the aforementioned sequence (M) or in any other sequences described herein is an initiator methionine. The presence of an initiator methionine is optional.

[0151] In some embodiments, the capture domain comprises a Tis11d fragment having an amino acid sequence of SEQ ID NO: 135. In some embodiments, the capture domain comprises the RNA binding domain of Tis11d having an amino acid sequence of SEQ ID NO: 136.

[0152] In some embodiments, the capture domain comprises Tis11d having an amino acid sequence of SEQ ID NO: 134 with at least one mutation selected from E195D, E195H, E195G, E195A, E195R, and E195K. In some embodiments, the capture domain comprises a Tis11d fragment having an amino acid sequence of SEQ ID NO: 135 with a mutation selected from at least one of E46D, E46H, E46G, E46A, E46R, and E46K. In some embodiments, the capture domain comprises the RNA binding domain of Tis11d having an amino acid sequence of SEQ ID NO: 136 with at least one mutation selected from E27D, E27H, E27G, E27A, E27R, and E27K.

[0153] In some embodiments, a capture domain comprising Tis11d, or a fragment or derivative thereof, comprises the amino acid sequence of SEQ ID NOs: 134-136 with at least 1, at least 2, at least 3, at least 4, at least 5, at least 6, at least 7, at least 8, at least 9, at least 10, at least 11, at least 12, at least 13, at least 14, at least 15, at least 16, at least 17, at least 18, at least 19, at least 20, at least 21, at least 22, at least 23, at least 24, at least 25 or more amino acid mutations. In some embodiments, the capture domain comprising Tis11d, or a fragment or derivative thereof, comprises a sequence with at least 90%, at least 95%, at least 97%, or at least 99% identity to any one of SEQ ID NOs: 134-136.

[0154] In some embodiments, the capture domain comprises eukaryotic translation initiation factor 4E (eIF4E), or a fragment or derivative thereof. eIF4E (see, e.g., Uniprot Accession No. P06730) binds to the mRNA cap. The amino acid sequence of eIF4E is:

(SEQ ID NO: 137)
(M)ATVEPETTPTPNPPTTEEEKTESNQEVANPEH
YIKHPLQNRWALWFFKNDKSKTWQANLRLISKFDT
VEDFWALYNHIQLSSNLMPGCDYSLFKDGIEPMWE
DEKNKRGGRWLITLNKQQRRSDLDRFWLETLLCLI
GESFDDYSDDVCGAVVNVRAKGDKIAIWTTECENR
EAVTHIGRVYKERLGLPPKIVIGYQSHADTATKSG
STTKNRFVV.

[0155] In some embodiments, the capture domain comprises an eIF4E fragment having an amino acid sequence of SEQ ID NO: 138.

[0156] In some embodiments, a capture domain comprising eIF4E, or a fragment or derivative thereof, comprises the amino acid sequence of SEQ ID NOs: 137-138 with at least 1, at least 2, at least 3, at least 4, at least 5, at least 6, at least 7, at least 8, at least 9, at least 10, at least 11, at least 12, at least 13, at least 14, at least 15, at least 16, at least 17, at least 18, at least 19, at least 20, at least 21, at least 22, at least 23, at least 24, at least 25 or more amino acid mutations. In some embodiments, the capture domain comprising eIF4E, or fragment or derivative thereof, comprises a sequence with at least 90%, at least 95%, at least 97%, or at least 99% identity to any one of SEQ ID NOs: 137-138.

[0157] In some embodiments, the capture domain comprises poly(A)-binding protein (PABP), or a fragment or derivative thereof. PABP (see, e.g., Uniprot Accession No. P11940) binds to the poly(A) tail of mRNA. The amino acid sequence of PABP is:

(SEQ ID NO: 139)
(M)NPSAPSYPMASLYVGDLHPDVTEAMLYEKFSP
AGPILSIRVCRDMITRRSLGYAYVNFQQPADAERA
LDTMNFDVIKGKPVRIMWSQRDPSLRKSGVGNIFI
KNLDKSIDNKALYDTFSAFGNILSCKVVCDENGSK
GYGFVHFETQEAAERAIEKMNGMLLNDRKVFVGRF
KSRKEREAELGARAKEFTNVYIKNEGEDMDDERLK
DLFGKFGPALSVKVMTDESGKSKGFGFVSFERHED
AQKAVDEMNGKELNGKQIYVGRAQKKVERQTELKR
KFEQMKQDRITRYQGVNLYVKNLDDGIDDERLRKE
FSPFGTITSAKVMMEGGRSKGFGFVCFSSPEEATK
AVTEMNGRIVATKPLYVALAQRKEERQAHLTNQYM
QRMASVRAVPNPVINPYQPAPPSGYFMAAIPQTQN
RAAYYPPSQIAQLRPSPRWTAQGARPHPFQNMPGA
IRPAAPRPPFSTMRPASSQVPRVMSTQRVANTSTQ
TMGPRPAAAAAAATPAVRTVPQYKYAAGVRNPQQH
LNAQPQVTMQQPAVHVQGQEPLTASMLASAPPQEQ
KQMLGERLFPLIQAMHPTLAGKITGMLLEIDNSEL
LHMLESPESLRSKVDEAVAVLQAHQAKEAAQKAVN
SATGVPTV.

[0158] In some embodiments, the capture domain comprises a PABP fragment having an amino acid sequence of SEQ ID NO: 140. In some embodiments, the capture domain comprises the RNA recognition motif (RRM) 1 domain of PABP having an amino acid sequence of SEQ ID NO: 141. In some embodiments, the capture domain comprises the RRM2 domain of PABP having an amino acid sequence of SEQ ID NO: 142. In some embodiments, the capture domain comprises the RRM3 domain of PABP having an amino acid sequence of SEQ ID NO: 143. In some embodiments, the capture domain comprises the RRM4 domain of PABP having an amino acid sequence of SEQ ID NO: 144.

[0159] In some embodiments, a capture domain comprising PABP, or a fragment or derivative thereof, comprises the amino acid sequence of any one of SEQ ID NOs: 139-144 with at least 1, at least 2, at least 3, at least 4, at least 5, at least 6, at least 7, at least 8, at least 9, at least 10, at least 11, at least 12, at least 13, at least 14, at least 15, at least 16, at least 17, at least 18, at least 19, at least 20, at least 21, at least 22, at least 23, at least 24, at least 25 or more amino acid mutations. In some embodiments, the capture domain comprising PABP, or fragment or derivative thereof, comprises a sequence with at least 90%, at least 95%, at least 97%, or at least 99% identity to any one of SEQ ID NOs: 139-144.

[0160] In some embodiments, the capture domain comprises Z-DNA binding protein 1 (ZBP1), or a fragment or derivative thereof. ZBP1 (see, e.g., Uniprot Accession No. Q9H171) binds to double stranded DNA. The amino acid sequence of ZBP1 is:

(SEQ ID NO: 145)
MAQAPADPGREGHLEQRILQVLTEAGSPVKLAQLV
KECQAPKRELNQVLYRMKKELKVSLTSPATWCLGG
TDPEGEGPAELALSSPAERPQQHAATIPETPGPQF
SQQREEDIYRFLKDNGPQRALVIAQALGMRTAKDV
NRDLYRMKSRHLLDMDEQSKAWTIYRPEDSGRRAK
SASIIYQHNPINMICQNGPNSWISIANSEATQIGH
GNIITRQTVSREDGSAGPRHLPSMAPGDSSTWGTL
VDPWGPQDIHMEQSILRRVQLGHSNEMRLHGVPSE
GPAHIPPGSPPVSATAAGPEASFEARIPSPGTHPE
GEAAQRIHMKSCFLEDATIGNSNKMSISPGVAGPG
GVAGSGEGEPGEDAGRRPADTQSRSHFPRDIGQPI
TPSHSKLTPKLETMTLGNRSHKAAEGSHYVDEASH
EGSWWGGGI.

[0161] In some embodiments, the capture domain comprises Z-binding domain 1 of ZBP1 having an amino acid sequence of SEQ ID NO: 146. In some embodiments, the capture domain comprises Z-binding domain 2 of ZBP1 having an amino acid sequence of SEQ ID NO: 147.

[0162] In some embodiments, a capture domain comprising ZBP1, or a fragment or derivative thereof, comprises the amino acid sequence of any one of SEQ ID NOs: 145-147 with at least 1, at least 2, at least 3, at least 4, at least 5, at least 6, at least 7, at least 8, at least 9, at least 10, at least 11, at least 12, at least 13, at least 14, at least 15, at least 16, at least 17, at least 18, at least 19, at least 20, at least 21, at least 22, at least 23, at least 24, at least 25 or more amino acid mutations. In some embodiments, the capture domain comprising ZBP1, or fragment or derivative thereof, comprises a sequence with at least 90%, at least 95%, at least 97%, or at least 99% identity to any one of SEQ ID NOs: 145-147.

[0163] In some embodiments, the capture domain comprises PUM-HD domain-containing protein (PUM-HD), or a fragment or derivative thereof. PUM-HD (see, e.g., Uniprot Accession No. B2BXX4) binds to mRNA. The amino acid sequence of PUM-HD is:

(SEQ ID NO: 148)
(M)HRGNEDLSFGDDYEKEIGLLLGEQQRRQEEAD
EIEKELNLYRSGSAPPTVDGSVNAAGGLFNGGGRG
PFMEFGGGNKGNGFGGDDDELRKDPAYLSYYYANM
KLNPRLPPPLMSREDLRVAQRLKGSSNVLGGVGDR
RNVNESRSLFSMPPGFDQMNEFEAEKTNASSSEWD
ANGLIGLPGLGLGGKQKSFADIFQPDMGHPVSQQP
SRPASRNAFDENVDSTNNQSPSASQGIGAPPPYSY
AAVLGSSLSRNGTPDPQAVARVPSPCLTPIGSGRV
SSNDKRNTSNQSPFNGVTSGLNESSDLVNALSGMN
LSGSGGLDDRGQAEQDVEKVRNYMFGFQGGHNEVS
QHVFPNKSDQAQKATGSLRNLHMRGSQGSAYNGGG
LANPYQHLDSPNYCLNNYALNPAVASVMANQLGNS
NFSPMYDNYSAASALGFSGMDSRLHGGGFESRNLG
RSNRMMGGGGLQSHMADPMYHQYGRYSENVDALDL
LNDPAMDRSFMGNSYMNMLELQRAYLGAQKSQYGV
PYKSGSPNSHSYYGSPTFGSNMSYPGSPLAHHAMQ
NSLMSPCSPMRRGEVNMRYPSATRNYSGGVMGSWH
MDASLDEGFGSSLLEEFKSNKTRGFELSEIAGHVV
EFSADQYGSRFIQQKLETATTDEKNMVYEEIMPHA
LALMTDVFGNYVIQKFFEHGLPPQRRELGDKLFEN
VLPLSLQMYGCRVIQKAIEVVDLDQKIKMVKELDG
HVMRCVRDQNGNHVVQKCIECVPEENIEFIISTFF
GHVVSLSTHPYGCRVIQRVLEHCHDPDTQSKVMEE
ILSTVSMLAQDQYGNYVVQHVLEHGKPDERTVIIK
ELAGKIVQMSQQKFASNVVEKCLTFGGPEERELLV
NEMLGTTDENEPLQAMMKDQFANYVVQKVLETCDD
QQRELILTRIKVHLNALKKYTYGKHVVARIEKLVA
AGGMHMFLLFPLGLKEENGFAVPNPASDVVRPQVL
YSLTRVDGSAIAF.

[0164] In some embodiments, a capture domain comprising PUM-HD, or a fragment or derivative thereof, comprises the amino acid sequence of SEQ ID NO: 148 with at least 1, at least 2, at least 3, at least 4, at least 5, at least 6, at least 7, at least 8, at least 9, at least 10, at least 11, at least 12, at least 13, at least 14, at least 15, at least 16, at least 17, at least 18, at least 19, at least 20, at least 21, at least 22, at least 23, at least 24, at least 25 or more amino acid mutations. In some embodiments, the capture domain comprising PUM-HD, or fragment or derivative thereof, comprises a sequence with at least 90%, at least 95%, at least 97%, or at least 99% identity to SEQ ID NO: 148.

[0165] In some embodiments, the capture domain binds a virus. In some embodiments, the virus is an adenovirus, an adeno-associated virus (AAV), a lentivirus, a retrovirus, a poxvirus or a herpesvirus. In some embodiments, the virus is a wildtype or mutant AAV selected from AAV1, AAV2, AAV3 (including types 3A and 3B), AAV4, AAV5, AAV6, AAV7, AAV8, AAV9, AAV10, AAV11, AAV12, AAV13, AAVrh32.33, AAVrh8, AAVrh10, AAVrh74, AAVhu.68, avian AAV, bovine AAV, canine AAV, equine AAV, ovine AAV, snake AAV, bearded dragon AAV, AAV2i8, AAV2g9, AAV-LK03, AAV7m8, AAV Anc80, AAV PHP.B, and any other AAV now known or later discovered. In some embodiments, the capture domain that binds to an AAV particle has an amino acid sequence of SEQ ID NO: 166, or an amino acid sequence with at least 90%, at least 95%, at least 96%, at least 97%, at least 98%, or at least 99% identity to SEQ ID NO: 166.

[0166] In some embodiments, the capture domain binds an adenovirus particle. Adenoviruses are medium-sized (90-100 nm) nonenveloped viruses from the family Adenoviridae with an icosahedral nucleocapsid containing a double stranded DNA genome. There are four genera of the family Adenoviridae (e.g., Aviadenovirus, Mastadenovirus, Atadenovirus, Ichtadenovirus, Siadenovirus). In some embodiments, the capture domain binds to an adenovirus from Aviadenovirus, Mastadenovirus, Atadenovirus, Ichtadenovirus, or Siadenovirus. In some embodiments, the capture domain binds to an adenovirus from Mastadenovirus. Human adenoviruses are grouped into seven different adenovirus serotypes: A, B, C, D, E, F, G, and H. In some embodiments, the capture domain binds to a human adenovirus particle of serotypes A, B, C, D, E, F, G, or H.

[0167] The adenovirus capsid comprises three major types of proteins: hexon, penton base, and fiber. The coxsackievirus and adenovirus receptor (see, e.g., Uniprot Accession No. P78310), which is expressed on heart, brain epithelial, and endothelial cells, binds to the fiber protein of the adenovirus capsid. The amino acid sequence of the coxsackievirus and adenovirus receptor from Homo sapiens is:

(SEQ ID NO: 62)
(M)ALLLCFVLLCGVVDFARSLSITTPEEMIEKAK
GETAYLPCKFTLSPEDQGPLDIEWLISPADNQKVD
QVIILYSGDKIYDDYYPDLKGRVHFTSNDLKSGDA
SINVTNLQLSDIGTYQCKVKKAPGVANKKIHLVVL
VKPSGARCYVDGSEEIGSDFKIKCEPKEGSLPLQY
EWQKLSDSQKMPTSWLAEMTSSVISVKNASSEYSG
TYSCTVRNRVGSDQCLLRLNVVPPSNKAGLIAGAI
IGTLLALALIGLIIFCCRKKRREEKYEKEVHHDIR
EDVPPPKSRTSTARSYIGSNHSSLGSMSPSNMEGY
SKTQYNQVPSEDFERTPQSPTLPPAKVAAPNLSRM
GAIPVMIPAQSKDGSIV.

[0168] In some embodiments, a capture domain of a purification matrix provided herein comprises the coxsackievirus and adenovirus receptor, or a fragment or derivative thereof.

[0169] In some embodiments, the capture domain comprising a coxsackievirus and adenovirus receptor, or fragment thereof, comprises an amino acid sequence selected from any one of SEQ ID NOs: 62-72. In some embodiments, the capture domain comprising a coxsackievirus and adenovirus receptor, or fragment thereof, comprises the amino acid sequence of any one of SEQ ID NOs: 62-72 with at least 1, at least 2, at least 3, at least 4, at least 5, at least 6, at least 7, at least 8, at least 9, at least 10, at least 11, at least 12, at least 13, at least 14, at least 15, at least 16, at least 17, at least 18, at least 19, at least 20, at least 21, at least 22, at least 23, at least 24, at least 25 or more amino acid mutations. In some embodiments, the capture domain comprising a coxsackievirus and adenovirus receptor, or fragment thereof, comprises a sequence with at least 90%, at least 95%, at least 97%, or at least 99% identity to any one of SEQ ID NOs: 62-72.

[0170] In some embodiments, the capture domain comprises the extracellular domain of the coxsackievirus and adenovirus receptor, or a fragment thereof. In some embodiments, the capture domain comprising the extracellular domain of the coxsackievirus and adenovirus receptor has an amino acid sequence of SEQ ID NO: 63 or 64. In some embodiments, the capture domain comprises domain 1 of the coxsackievirus and adenovirus receptor, or a fragment thereof. In some embodiments, the capture domain comprising domain 1 of the coxsackievirus and adenovirus receptor has an amino acid sequence of SEQ ID NO: 65. In some embodiments, the capture domain comprises domain 2 of the coxsackievirus and adenovirus receptor, or a fragment thereof. In some embodiments, the capture domain comprising domain 2 of the coxsackievirus and adenovirus receptor has an amino acid sequence of SEQ ID NO: 66. In some embodiments, the capture domain comprises isoform 3 of the coxsackievirus and adenovirus receptor, or a fragment thereof. In some embodiments, the capture domain comprising isoform 3 of the coxsackievirus and adenovirus receptor has an amino acid sequence of SEQ ID NO: 67. In some embodiments, the capture domain comprises isoform 4 of the coxsackievirus and adenovirus receptor, or a fragment thereof. In some embodiments, the capture domain comprising isoform 4 of the coxsackievirus and adenovirus receptor has an amino acid sequence of SEQ ID NO: 68. In some embodiments, the capture domain comprises isoform 5 of the coxsackievirus and adenovirus receptor, or a fragment thereof. In some embodiments, the capture domain comprising isoform 5 of the coxsackievirus and adenovirus receptor has an amino acid sequence of SEQ ID NO: 69. In some embodiments, the capture domain comprises isoform 7 of the coxsackievirus and adenovirus receptor, or a fragment thereof. In some embodiments, the capture domain comprising isoform 7 of the coxsackievirus and adenovirus receptor has an amino acid sequence of SEQ ID NO: 70.

[0171] In some embodiments, the capture domain comprises an amino acid sequence of M(RAIVFRVQWLRRYFVNGSRSGGG)ₙ, where n is an integer from 1 to 8 (SEQ ID NO: 71), for example, n is 1, 2, 3, 4, 5, 6, 7, or 8. In some embodiments, the capture domain comprises an amino acid sequence of (RAIVFRVQWLRRYFVNGSRSGGG)ₙ, wherein n is an integer from 1 to 8 (SEQ ID NO: 72), for example, 1, 2, 3, 4, 5, 6, 7, or 8.

[0172] In some embodiments, the capture domain that binds to an adenovirus particle has an amino acid sequence of SEQ ID NO: 167, or an amino acid sequence with at least 90%, at least 95%, at least 96%, at least 97%, at least 98%, or at least 99% identity to SEQ ID NO: 167.

[0173] In some embodiments, a capture domain of a purification matrix provided herein comprises the cluster of differentiation 80 (CD80), or a fragment or derivative thereof. CD80 (see, e.g., Uniprot Accession No. P33681) is a type 1 membrane protein of the immunoglobulin superfamily. CD80 binds to at least the knob domain of the fiber protein of adenovirus species B. The amino acid sequence of CD80 from Homo sapiens is

(SEQ ID NO: 98)
(M)GHTRRQGTSPSKCPYLNFFQLLVLAGLSHFCS
GVIHVTKEVKEVATLSCGHNVSVEELAQTRIYWQK
EKKMVLTMMSGDMNIWPEYKNRTIFDITNNLSIVI
LALRPSDEGTYECVVLKYEKDAFKREHLAEVTLSV
KADFPTPSISDFEIPTSNIRRIICSTSGGFPEPHL
SWLENGEELNAINTTVSQDPETELYAVSSKLDFNM
TTNHSFMCLIKYGHLRVNQTFNWNTTKQEHFPDNL
LPSWAITLISVNGIFVICCLTYCFAPRCRERRRNE
RLRRESVRPV.

[0174] In some embodiments, the capture domain comprises the extracellular domain of CD80, or a fragment or derivative thereof, having an amino acid sequence of SEQ ID NO: 99 or SEQ ID NO: 100.

[0175] In some embodiments, the capture domain comprising CD80, or a fragment or derivative thereof, comprises an amino acid sequence selected from any one of SEQ ID NOs: 98-100. In some embodiments, the capture domain comprising CD80, or a fragment or derivative thereof, comprises the amino acid sequence of any one of SEQ ID NOs: 98-100 with at least 1, at least 2, at least 3, at least 4, at least 5, at least 6, at least 7, at least 8, at least 9, at least 10, at least 11, at least 12, at least 13, at least 14, at least 15, at least 16, at least 17, at least 18, at least 19, at least 20, at least 21, at least 22, at least 23, at least 24, at least 25 or more amino acid mutations. In some embodiments, the capture domain comprising CD80, or fragment thereof, comprises a sequence with at least 90%, at least 95%, at least 97%, or at least 99% identity to any one of SEQ ID Nos: 98-100.

[0176] In some embodiments, a capture domain of a purification matrix provided herein comprises the cluster of differentiation 86 (CD86), or a fragment or derivative thereof. CD86 (see, e.g., Uniprot Accession No. P42081) is a type 1 membrane protein of the immunoglobulin superfamily. CD86 binds to at least the knob domain of the fiber protein of adenovirus species B. The amino acid sequence of CD86 from Homo sapiens is

(SEQ ID NO: 101)
(M)DPQCTMGLSNILFVMAFLLSGAAPLKIQAYFN
ETADLPCQFANSQNQSLSELVVFWQDQENLVLNEV
YLGKEKFDSVHSKYMGRTSFDSDSWTLRLHNLQIK
DKGLYQCIIHHKKPTGMIRIHQMNSELSVLANFSQ
PEIVPISNITENVYINLTCSSIEGYPEPKKMSVLL
RTKNSTIEYDGVMQKSQDNVTELYDVSISLSVSFP
DVTSNMTIFCILETDKTRLLSSPFSIELEDPQPPP
DHIPWITAVLPTVIICVMVFCLILWKWKKKKRPRN
SYKCGTNTMEREESEQTKKREKIHIPERSDEAQRV
FKSSKTSSCDKSDTCF.

[0177] In some embodiments, the capture domain comprises the extracellular domain of CD86. In some embodiments, the capture domain comprises the extracellular domain of CD86, having an amino acid sequence of SEQ ID NO: 102. In some embodiments, the capture domain comprises a fragment of the extracellular domain of CD86, having an amino acid sequence of SEQ ID NOs: 103 or 104.

[0178] In some embodiments, the capture domain comprising CD86, or a fragment or derivative thereof, comprises an amino acid sequence selected from any one of SEQ ID NOs: 101-104. In some embodiments, the capture domain comprising CD86, or a fragment or derivative thereof, comprises the amino acid sequence of any one of SEQ ID NOs: 101-104 with at least 1, at least 2, at least 3, at least 4, at least 5, at least 6, at least 7, at least 8, at least 9, at least 10, at least 11, at least 12, at least 13, at least 14, at least 15, at least 16, at least 17, at least 18, at least 19, at least 20, at least 21, at least 22, at least 23, at least 24, at least 25 or more amino acid mutations. In some embodiments, the capture domain comprising CD86, or fragment thereof, comprises a sequence with at least 90%, at least 95%, at least 97%, or at least 99% identity to any one of SEQ ID Nos: 101-104.

[0179] In some embodiments, the capture domain binds a lentovirus particle. Lentivirus is a genus of retroviruses that causes chronic and deadly diseases characterized by long incubation periods. Examples of lentiviruses include human immunodeficiency virus (HIV) and vesicular stomatitis virus (VSV). There are five serogroups of lentivirus: bovine, equine, feline, ovinecaprine, and primate. In some embodiments, the capture domain binds a lentovirus particle of the bovine, equine, feline, ovinecaprine, or primate serogroups. In some embodiments, lentiviruses infect host cells via binding to the low-density lipoprotein receptor (LDLR) or cluster of differentiation 4 (CD4).

[0180] In some embodiments, the capture domain that binds to an lentivirus particle has an amino acid sequence of SEQ ID NO: 168, or an amino acid sequence with at least 90%, at least 95%, at least 96%, at least 97%, at least 98%, or at least 99% identity to SEQ ID NO: 168. In some embodiments, the capture domain that binds to an lentivirus particle has an amino acid sequence of SEQ ID NO: 169, or an amino acid sequence with at least 90%, at least 95%, at least 96%, at least 97%, at least 98%, or at least 99% identity to SEQ ID NO: 169.

[0181] In some embodiments, a capture domain of a purification matrix provided herein comprises the LDLR, or a fragment or derivative thereof. LDLR (see, e.g., Uniprot Accession No. P01130) is a cell-surface receptor that mediates the endocytosis of cholesterol rich low-density lipoprotein. The amino acid sequence of LDLR from Homo sapiens is

(SEQ ID NO: 73)
(M)GPWGWKLRWTVALLLAAAGTAVGDRCERNEFQ
CQDGKCISYKWVCDGSAECQDGSDESQETCLSVTC
KSGDFSCGGRVNRCIPQFWRCDGQVDCDNGSDEQG
CPPKTCSQDEFRCHDGKCISRQFVCDSDRDCLDGS
DEASCPVLTCGPASFQCNSSTCIPQLWACDNDPDC
EDGSDEWPQRCRGLYVFQGDSSPCSAFEFHCLSGE
CIHSSWRCDGGPDCKDKSDEENCAVATCRPDEFQC
SDGNCIHGSRQCDREYDCKDMSDEVGCVNVTLCEG
PNKFKCHSGECITLDKVCNIVIARDCRDWSDEPIK
ECGTNECLDNNGGCSHVCNDLKIGYECLCPDGFQL
VAQRRCEDIDECQDPDTCSQLCVNLEGGYKCQCEE
GFQLDPHTKACKAVGSIAYLFFTNRHEVRKMTLDR
SEYTSLIPNLRNVVALDTEVASNRIYWSDLSQRMI
CSTQLDRAHGVSSYDTVISRDIQAPDGLAVDWIHS
NIYWTDSVLGTVSVADTKGVKRKTLFRENGSKPRA
IVVDPVHGFMYWTDWGTPAKIKKGGLNGVDIYSLV
TENIQWPNGITLDLLSGRLYWVDSKLHSISSIDVN
GGNRKTILEDEKRLAHPFSLAVFEDKVFWTDIINE
AIFSANRLTGSDVNLLAENLLSPEDMVLFHNLTQP
RGVNWCERTTLSNGGCQYLCLPAPQINPHSPKFTC
ACPDGMLLARDMRSCLTEAEAAVATQETSTVRLKV
SSTAVRTQHTTTRPVPDTSRLPGATPGLTTVEIVT
MSHQALGDVAGRGNEKKPSSVRALSIVLPIVLLVF
LCLGVFLLWKNWRLKNINSINFDNPVYQKTTEDEV
HICHNQDGYSYPSRQMVSLEDDVA.

[0182] In some embodiments, the capture domain comprises the extracellular domain of LDLR having an amino acid sequence of SEQ ID NO: 74. In some embodiments, the capture domain comprises a fragment of the extracellular domain of LDLR having an amino acid sequence of SEQ ID NO: 77. In some embodiments, the capture domain comprises the CR2 domain of LDLR having an amino acid sequence of SEQ ID NO: 75. In some embodiments, the capture domain comprises the CR3 domain of LDLR having an amino acid sequence of SEQ ID NO: 76.

[0183] In some embodiments, the capture domain comprising LDLR, or a fragment or derivative thereof, comprises an amino acid sequence selected from any one of SEQ ID NOs: 73-76. In some embodiments, the capture domain comprising LDLR, or a fragment or derivative thereof, comprises the amino acid sequence of any one of SEQ ID NOs: 73-76 with at least 1, at least 2, at least 3, at least 4, at least 5, at least 6, at least 7, at least 8, at least 9, at least 10, at least 11, at least 12, at least 13, at least 14, at least 15, at least 16, at least 17, at least 18, at least 19, at least 20, at least 21, at least 22, at least 23, at least 24, at least 25 or more amino acid mutations. In some embodiments, the capture domain comprising LDLR, or fragment thereof, comprises a sequence with at least 90%, at least 95%, at least 97%, or at least 99% identity to any one of SEQ ID Nos: 73-76.

[0184] In some embodiments, a capture domain of a purification matrix provided herein comprises CD4, or a fragment or derivative thereof. In some embodiments, a capture domain comprising CD4 binds to a lentivirus particle or a retrovirus particle. In some embodiments, CD4 binds to glycoprotein 120 (gp120) of human immunodeficiency virus.

[0185] CD4 (see, e.g., Uniprot Accession No. P01730) is a glycoprotein found on the surface of immune cells such as T helper cells, monocytes, macrophages, and dendritic cells. The amino acid sequence of CD4 from Homo sapiens is

(SEQ ID NO: 78)
(M)NRGVPFREILLLVLQLALLPAATQGKKVVLGK
KGDTVELTCTASQKKSIQFHWKNSNQIKILGNQGS
FLTKGPSKLNDRADSRRSLWDQGNFPLIIKNLKIE
DSDTYICEVEDQKEEVQLLVFGLTANSDTHLLQGQ
SLTLTLESPPGSSPSVQCRSPRGKNIQGGKTLSVS
QLELQDSGTWTCTVLQNQKKVEFKIDIVVLAFQKA
SSIVYKKEGEQVEFSFPLAFTVEKLTGSGELWWQA
ERASSSKSWITFDLKNKEVSVKRVTQDPKLQMGKK
LPLHLTLPQALPQYAGSGNLTLALEAKTGKLHQEV
NLVVMRATQLQKNLTCEVWGPTSPKLMLSLKLENK
EAKVSKREKAVWVLNPEAGMWQCLLSDSGQVLLES
NIKVLPTWSTPVQPMALIVLGGVAGLLLFIGLGIF
FCVRCRHRRRQAERMSQIKRLLSEKKTCQCPHRFQ
KTCSPI.

[0186] In some embodiments, the capture domain comprises CD4 having an amino acid sequence of SEQ ID NO: 78. In some embodiments, the capture domain comprises CD4 having an amino acid sequence of SEQ ID NO: 78 having at least one, at least two, at least three, or at least four mutations of amino acids 112, 113, 116, and 117 to glycine, alanine, lysine, arginine, or histidine.

[0187] In some embodiments, the capture domain comprises the extracellular domain of CD4. In some embodiments, the capture domain comprises the extracellular domain of CD4 having an amino acid sequence of SEQ ID NO: 79.

[0188] In some embodiments, the capture domain comprises a fragment of the extracellular domain of CD4 having an amino acid sequence of SEQ ID NO: 80. In some embodiments, the capture domain comprises domain 1 of CD4 having an amino acid sequence of SEQ ID NO: 81. In some embodiments, the capture domain comprises the extracellular domain of CD4 or a fragment or derivative thereof (SEQ ID NOs: 79-81) having at least one, at least two, at least three, or at least four mutations at amino acids 88, 89, 92, and 93 to glycine, alanine, lysine, arginine, or histidine.

[0189] In some embodiments, the capture domain comprising CD4, or a fragment or derivative thereof, comprises an amino acid sequence selected from any one of SEQ ID NOs: 78-81. In some embodiments, the capture domain comprising CD4, or a fragment or derivative thereof, comprises the amino acid sequence of any one of SEQ ID NOs: 78-81 with at least 1, at least 2, at least 3, at least 4, at least 5, at least 6, at least 7, at least 8, at least 9, at least 10, at least 11, at least 12, at least 13, at least 14, at least 15, at least 16, at least 17, at least 18, at least 19, at least 20, at least 21, at least 22, at least 23, at least 24, at least 25 or more amino acid mutations. In some embodiments, the capture domain comprising CD4, or fragment thereof, comprises a sequence with at least 90%, at least 95%, at least 97%, or at least 99% identity to any one of SEQ ID Nos: 78-81.

[0190] In some embodiments, a capture domain of a purification matrix provided herein comprises cluster of differentiation 46 (CD46), or a fragment or derivative thereof. In some embodiments, a capture domain comprising CD46 or a fragment or derivative thereof binds to a measles virus particle, a herpesvirus particle, an adenovirus particle, Streptococcus pyogenes, or pathogenic Nesseria. CD46 (see, e.g., Uniprot Accession No. P15529) is a type 1 membrane protein and is a regulatory part of the complement system. In some embodiments, a capture domain comprising CD46 or a fragment or derivative thereof binds to group B adenoviruses. In some embodiments, a capture domain comprising CD46 or a fragment or derivative thereof binds to human herpesvirus-6. The amino acid sequence of CD46 is:

(SEQ ID NO: 82)
(M)EPPGRRECPFPSWRFPGLLLAAMVLLLYSFSD
ACEEPPTFEAMELIGKPKPYYEIGERVDYKCKKGY
FYIPPLATHTICDRNHTWLPVSDDACYRETCPYIR
DPLNGQAVPANGTYEFGYQMHFICNEGYYLIGEEI
LYCELKGSVAIWSGKPPICEKVLCTPPPKIKNGKH
TFSEVEVFEYLDAVTYSCDPAPGPDPFSLIGESTI
YCGDNSVWSRAAPECKVVKCRFPVVENGKQISGFG
KKFYYKATVMFECDKGFYLDGSDTIVCDSNSTWDP
PVPKCLKVLPPSSTKPPALSHSVSTSSTTKSPASS
ASGPRPTYKPPVSNYPGYPKPEEGILDSLDVWVIA
VIVIAIVVGVAVICVVPYRYLQRRKKKGTYLTDET
HREVKFTSL.

[0191] In some embodiments, a capture domain comprises the extracellular domain of CD46 or a fragment or derivative thereof. In some embodiments, a capture domain comprises the extracellular domain of CD46 or a fragment or derivative thereof, having an amino acid sequence of SEQ ID NO: 83 or SEQ ID NO: 84. In some embodiments, the capture domain comprises domain 1 of CD46 having an amino acid sequence of SEQ ID NO: 85. In some embodiments, the capture domain comprises domain 2 of CD46 having an amino acid sequence of SEQ ID NO: 86. In some embodiments, the capture domain comprises domain 3 of CD46 having an amino acid sequence of SEQ ID NO: 87. In some embodiments, the capture domain comprises domain 4 of CD46 having an amino acid sequence of SEQ ID NO: 88. In some embodiments, the capture domain comprises domain 5 of CD46 having an amino acid sequence of SEQ ID NO: 89.

[0192] In some embodiments, the capture domain comprising CD46, or a fragment or derivative thereof, comprises an amino acid sequence selected from any one of SEQ ID NOs: 82-89. In some embodiments, the capture domain comprising CD46, or a fragment or derivative thereof, comprises the amino acid sequence of any one of SEQ ID NOs: 82-89 with at least 1, at least 2, at least 3, at least 4, at least 5, at least 6, at least 7, at least 8, at least 9, at least 10, at least 11, at least 12, at least 13, at least 14, at least 15, at least 16, at least 17, at least 18, at least 19, at least 20, at least 21, at least 22, at least 23, at least 24, at least 25 or more amino acid mutations. In some embodiments, the capture domain comprising CD46, or fragment thereof, comprises a sequence with at least 90%, at least 95%, at least 97%, or at least 99% identity to any one of SEQ ID Nos: 82-89.

[0193] In some embodiments, the capture domain binds a measles virus particle. Measles virus is a single-stranded, negative-sense, enveloped, non-segmented RNA virus of the genus Morbillivirus within the family Paramyxoviridae. The measles virus has two envelope glycoproteins on the viral surface: hemagglutinin (H) and membrane fusion protein (F). Receptors for the measles H protein include CD46, the signaling lymphocyte activation molecule (SLAMF1), and the cell adhesion molecule Nectin-4.

[0194] In some embodiments, a capture domain of a purification matrix provided herein comprises SLAMF1, or a fragment or derivative thereof. In some embodiments, a capture domain comprising SLAMF1 or a fragment or derivative thereof binds to a measles virus particle. SLAMF1 (see, e.g., Uniprot Accession No. Q13291) belongs to the signaling lymphocytic activation molecule family. The amino acid sequence of SLAMF1 is:

(SEQ ID NO: 90)
(M)DPKGLLSLTFVLFLSLAFGASYGTGGRMMNCP
KILRQLGSKVLLPLTYERINKSMNKSIHIVVTMAK
SLENSVENKIVSLDPSEAGPPRYLGDRYKFYLENL
TLGIRESRKEDEGWYLMTLEKNVSVQRFCLQLRLY
EQVSTPEIKVLNKTQENGTCTLILGCTVEKGDHVA
YSWSEKAGTHPLNPANSSHLLSLTLGPQHADNIYI
CTVSNPISNNSQTFSPWPGCRTDPSETKPWAVYAG
LLGGVEVIILEVIVVILQLRRRGKTNHYQTTVEKK
SLTIYAQVQKPGPLQKKLDSFPAQDPCTTIYVAAT
EPVPESVQETNSITVYASVTLPES.

[0195] In some embodiments, a capture domain comprises the extracellular domain of SLAMF1 or a fragment or derivative thereof. In some embodiments, a capture domain comprises the extracellular domain of SLA1MF1 or a fragment or derivative thereof, having an amino acid sequence of SEQ ID NO: 91 or SEQ ID NO: 92.

[0196] In some embodiments, the capture domain comprising SLAMF1, or a fragment or derivative thereof, comprises an amino acid sequence selected from any one of SEQ ID NOs: 90-92. In some embodiments, the capture domain comprising SLAMF1, or a fragment or derivative thereof, comprises the amino acid sequence of any one of SEQ ID NOs: 90-92 with at least 1, at least 2, at least 3, at least 4, at least 5, at least 6, at least 7, at least 8, at least 9, at least 10, at least 11, at least 12, at least 13, at least 14, at least 15, at least 16, at least 17, at least 18, at least 19, at least 20, at least 21, at least 22, at least 23, at least 24, at least 25 or more amino acid mutations. In some embodiments, the capture domain comprising SLAMF1, or fragment thereof, comprises a sequence with at least 90%, at least 95%, at least 97%, or at least 99% identity to any one of SEQ ID Nos: 90-92.

[0197] In some embodiments, a capture domain of a purification matrix provided herein comprises Nectin-4, or a fragment or derivative thereof. In some embodiments, a capture domain comprising Nectin-4 or a fragment or derivative thereof binds to a measles virus particle. Nectin-4 (see, e.g., Uniprot Accession No. Q96NY8) belongs to the family of cellular adhesion molecules involved in calcium-independent cellular adhesion. The amino acid sequence of Nectin-4 is:

(SEQ ID NO: 93)
(M)PLSLGAEMWGPEAWLLLLLLLASFTGRCPAGE
LETSDVVTVVLGQDAKLPCFYRGDSGEQVGQVAWA
RVDAGEGAQELALLHSKYGLHVSPAYEGRVEQPPP
PRNPLDGSVLLRNAVQADEGEYECRVSTFPAGSFQ
ARLRLRVLVPPLPSLNPGPALEEGQGLTLAASCTA
EGSPAPSVTWDTEVKGTTSSRSFKHSRSAAVTSEF
HLVPSRSMNGQPLTCVVSHPGLLQDQRITHILHVS
FLAEASVRGLEDQNLWHIGREGAMLKCLSEGQPPP
SYNWTRLDGPLPSGVRVDGDTLGFPPLTTEHSGIY
VCHVSNEFSSRDSQVTVDVLDPQEDSGKQVDLVSA
SVVVVGVIAALLFCLLVVVVVLMSRYHRRKAQQMT
QKYEEELTLTRENSIRRLHSHHTDPRSQPEESVGL
RAEGHPDSLKDNSSCSVMSEEPEGRSYSTLTTVRE
IETQTELLSPGSGRAEEEEDQDEGIKQAMNHFVQE
NGTLRAKPTGNGIYINGRGHLV.

[0198] In some embodiments, a capture domain comprises the extracellular domain of Nectin-4 or a fragment or derivative thereof. In some embodiments, a capture domain comprises the extracellular domain of Nectin-4 or a fragment or derivative thereof, having an amino acid sequence of SEQ ID NO: 94. In some embodiments, a capture domain comprises domain 1 of Nectin-4 or a fragment or derivative thereof, having an amino acid sequence of SEQ ID NO: 95. In some embodiments, a capture domain comprises domain 2 of Nectin-4 or a fragment or derivative thereof, having an amino acid sequence of SEQ ID NO: 96. In some embodiments, a capture domain comprises domain 3 of Nectin-4 or a fragment or derivative thereof, having an amino acid sequence of SEQ ID NO: 97.

[0199] In some embodiments, the capture domain comprising Nectin-4, or a fragment or derivative thereof, comprises an amino acid sequence selected from any one of SEQ ID NOs: 93-97. In some embodiments, the capture domain comprising Nectin-4, or a fragment or derivative thereof, comprises the amino acid sequence of any one of SEQ ID NOs: 93-97 with at least 1, at least 2, at least 3, at least 4, at least 5, at least 6, at least 7, at least 8, at least 9, at least 10, at least 11, at least 12, at least 13, at least 14, at least 15, at least 16, at least 17, at least 18, at least 19, at least 20, at least 21, at least 22, at least 23, at least 24, at least 25 or more amino acid mutations. In some embodiments, the capture domain comprising Nectin-4, or fragment thereof, comprises a sequence with at least 90%, at least 95%, at least 97%, or at least 99% identity to any one of SEQ ID Nos: 93-97.

[0200] In some embodiments, the capture domain binds a baboon endogenous virus particle. Baboon endogenous virus (BaEV) is a type C endogenous oncovirus. BaEV contains a type D envelope (env) gene. BaEV virus particles bind to neutral amino acid transporter B(0) (SLC1A5) and/or neutral amino acid transporter A (SLC1A4).

[0201] In some embodiments, a capture domain of a purification matrix provided herein comprises SLC1A5, or a fragment or derivative thereof. SLC1A5 (see, e.g., Uniprot Accession No. Q15758) is a sodium-dependent amino acid transporter. The amino acid sequence of SLC1A5 is:

(SEQ ID NO: 105)
(M)VADPPRDSKGLAAAEPTANGGLALASIEDQGA
AAGGYCGSRDQVRRCLRANLLVLLTVVAVVAGVAL
GLGVSGAGGALALGPERLSAFVFPGELLLRLLRMI
ILPLVVCSLIGGAASLDPGALGRLGAWALLFFLVT
TLLASALGVGLALALQPGAASAAINASVGAAGSAE
NAPSKEVLDSFLDLARNIFPSNLVSAAFRSYSTTY
EERNITGTRVKVPVGQEVEGMNILGLVVFAIVFGV
ALRKLGPEGELLIRFFNSFNEATMVLVSWIMWYAP
VGIMFLVAGKIVEMEDVGLLFARLGKYILCCLLGH
AIHGLLVLPLIYFLFTRKNPYRFLWGIVTPLATAF
GTSSSSATLPLMMKCVEENNGVAKHISRFILPIGA
TVNMDGAALFQCVAAVFIAQLSQQSLDFVKITTIL
VTATASSVGAAGIPAGGVLTLAIILEAVNLPVDHI
SLILAVDWLVDRSCTVLNVEGDALGAGLLQNYVDR
TESRSTEPELIQVKSELPLDPLPVPTEEGNPLLKH
YRGPAGDATVASEKESVM.

[0202] In some embodiments, a capture domain comprises the extracellular domain of SLC1A5 or a fragment or derivative thereof. In some embodiments, a capture domain comprises the extracellular domain of SLC1A5 or a fragment or derivative thereof, having an amino acid sequence of any one of SEQ ID NOs: 106-110.

[0203] In some embodiments, the capture domain comprising SLC1A5, or a fragment or derivative thereof, comprises an amino acid sequence selected from any one of SEQ ID NOs: 105-110. In some embodiments, the capture domain comprising SLC1A5, or a fragment or derivative thereof, comprises the amino acid sequence of any one of SEQ ID NOs: 105-110 with at least 1, at least 2, at least 3, at least 4, at least 5, at least 6, at least 7, at least 8, at least 9, at least 10, at least 11, at least 12, at least 13, at least 14, at least 15, at least 16, at least 17, at least 18, at least 19, at least 20, at least 21, at least 22, at least 23, at least 24, at least 25 or more amino acid mutations. In some embodiments, the capture domain comprising SLC1A5, or fragment thereof, comprises a sequence with at least 90%, at least 95%, at least 97%, or at least 99% identity to any one of SEQ ID NOs: 105-110.

[0204] In some embodiments, a capture domain of a purification matrix provided herein comprises SLC1A4, or a fragment or derivative thereof. SLC1A4 (see, e.g., Uniprot Accession No. P43007) is a transporter of alanine, serine, cysteine, and threonine. The amino acid sequence of SLC1A4 is:

(SEQ ID NO: 111)
(M)EKSNETNGYLDSAQAGPAAGPGAPGTAAGRAR
RCAGFLRRQALVLLTVSGVLAGAGLGAALRGLSLS
RTQVTYLAFPGEMLLRMLRMIILPLVVCSLVSGAA
SLDASCLGRLGGIAVAYFGLTTLSASALAVALAFI
IKPGSGAQTLQSSDLGLEDSGPPPVPKETVDSFLD
LARNLFPSNLVVAAFRTYATDYKVVTQNSSSGNVT
HEKIPIGTEIEGMNILGLVLFALVLGVALKKLGSE
GEDLIRFFNSLNEATMVLVSWIMWYVPVGIMFLVG
SKIVEMKDIIVLVTSLGKYIFASILGHVIHGGIVL
PLIYFVFTRKNPFRFLLGLLAPFATAFATCSSSAT
LPSMMKCIEENNGVDKRISRFILPIGATVNMDGAA
IFQCVAAVFIAQLNNVELNAGQIFTILVTATASSV
GAAGVPAGGVLTIAIILEAIGLPTHDLPLILAVDW
IVDRTTTVVNVEGDALGAGILHHLNQKATKKGEQE
LAEVKVEAIPNCKSEEETSPLVTHQNPAGPVASAP
ELESKESVL.

[0205] In some embodiments, a capture domain comprises the extracellular domain of SLC1A4 or a fragment or derivative thereof. In some embodiments, a capture domain comprises the extracellular domain of SLC1A4 or a fragment or derivative thereof, having an amino acid sequence of SEQ ID NO: 112. In some embodiments, a capture domain comprises a fragment of SLC1A4 or a fragment or derivative thereof, having an amino acid sequence of SEQ ID NO: 113.

[0206] In some embodiments, the capture domain comprising SLC1A4, or a fragment or derivative thereof, comprises an amino acid sequence selected from any one of SEQ ID NOs: 111-113. In some embodiments, the capture domain comprising SLC1A4, or a fragment or derivative thereof, comprises the amino acid sequence of any one of SEQ ID NOs: 111-113 with at least 1, at least 2, at least 3, at least 4, at least 5, at least 6, at least 7, at least 8, at least 9, at least 10, at least 11, at least 12, at least 13, at least 14, at least 15, at least 16, at least 17, at least 18, at least 19, at least 20, at least 21, at least 22, at least 23, at least 24, at least 25 or more amino acid mutations. In some embodiments, the capture domain comprising SLC1A4, or fragment thereof, comprises a sequence with at least 90%, at least 95%, at least 97%, or at least 99% identity to any one of SEQ ID NOs: 111-113.

[0207] In some embodiments, the capture domain binds a Nipah or Hendra virus particle. Nipah and Hendra viruses are both members of the Paramyxoviridae family and cause respiratory and nervous system disease. Nipah and Hendra viruses enter cells via the ephrin-B2 and ephrin-B3.

[0208] In some embodiments, a capture domain of a purification matrix provided herein comprises ephrin-B2, or a fragment or derivative thereof. In some embodiments, a capture domain comprising ephrin-B2 or a fragment or derivative thereof binds to a Nipah virus particle or a Hendra virus particle. Ephrin-B2 (see, e.g., Uniprot Accession No. P52799) binds promiscuously to ephrin receptors. Ephrin receptors are a family of receptor tyrosine kinases which are crucial for migration, repulsion, and adhesion during neuronal, vascular, and epithelial development. The amino acid sequence of ephrin-B2 is:

(SEQ ID NO: 114)
(M)AVRRDSVWKYCWGVLMVLCRTAISKSIVLEPI
YWNSSNSKFLPGQGLVLYPQIGDKLDIICPKVDSK
TVGQYEYYKVYMVDKDQADRCTIKKENTPLLNCAK
PDQDIKFTIKFQEFSPNLWGLEFQKNKDYYIISTS
NGSLEGLDNQEGGVCQTRAMKILMKVGQDASSAGS
TRNKDPTRRPELEAGTNGRSSTTSPFVKPNPGSST
DGNSAGHSGNNILGSEVALFAGIASGCIIFIVIII
TLVVLLLKYRRRHRKHSPQHTTTLSLSTLATPKRS
GNNNGSEPSDIIIPLRTADSVFCPHYEKVSGDYGH
PVYIVQEMPPQSPANIYYKV.

[0209] In some embodiments, a capture domain comprises the extracellular domain of ephrin-B2 or a fragment or derivative thereof. In some embodiments, a capture domain comprises the extracellular domain of ephrin-B2 or a fragment or derivative thereof, having an amino acid sequence of SEQ ID NO: 115.

[0210] In some embodiments, the capture domain comprising ephrin-B2, or a fragment or derivative thereof, comprises an amino acid sequence selected from SEQ ID NO: 114 or SEQ ID NO: 115. In some embodiments, the capture domain comprising ephrin-B2, or a fragment or derivative thereof, comprises the amino acid sequence of SEQ ID NO: 114 or SEQ ID NO: 115 with at least 1, at least 2, at least 3, at least 4, at least 5, at least 6, at least 7, at least 8, at least 9, at least 10, at least 11, at least 12, at least 13, at least 14, at least 15, at least 16, at least 17, at least 18, at least 19, at least 20, at least 21, at least 22, at least 23, at least 24, at least 25 or more amino acid mutations. In some embodiments, the capture domain comprising ephrin-B2, or fragment thereof, comprises a sequence with at least 90%, at least 95%, at least 97%, or at least 99% identity to SEQ ID NO: 114 or SEQ ID NO: 115.

[0211] In some embodiments, the capture domain binds a retrovirus particle. In some embodiments, the capture domain binds to Gibbon-ape leukemia virus (GaLV). GaLV is an oncogenic type C retrovirus isolated from the white-handed gibbon and wooly monkey. GaLV virus enters host cells via the sodium-dependent phosphate transporter 1 (SLC20A1) or sodium-dependent phosphate transporter 2 (SLC20A2).

[0212] In some embodiments, a capture domain of a purification matrix provided herein comprises SLC20A1, or a fragment or derivative thereof. In some embodiments, a capture domain comprising SLC20A1 or a fragment or derivative thereof binds to a GaLV virus particle. SLC20A1 (see, e.g., Uniprot Accession No. Q8WUM9) is a sodium-phosphate symporter, which confers human cells susceptibility to GaLV. The amino acid sequence of SLC20A1 is:

(SEQ ID NO: 116)
MATLITSTTAATAASGPLVDYLWMLILGFIIAFVLAFSVGANDVANSFG
TAVGSGVVTLKQACILASIFETVGSVLLGAKVSETIRKGLIDVEMYNST
QGLLMAGSVSAMFGSAVWQLVASFLKLPISGTHCIVGATIGFSLVAKGQ
EGVKWSELIKIVMSWFVSPLLSGEVISGILFFLVRAFILHKADPVPNGL
RALPVFYACTVGINLFSIMYTGAPLLGFDKLPLWGTILISVGCAVFCAL
IVWFFVCPRMKRKIEREIKCSPSESPLMEKKNSLKEDHEETKLSVGDIE
NKHPVSEVGPATVPLQAVVEERTVSFKLGDLEEAPERERLPSVDLKEET
SIDSTVNGAVQLPNGNLVQFSQAVSNQINSSGHYQYHTVHKDSGLYKEL
LHKLHLAKVGDCMGDSGDKPLRRNNSYTSYTMAICGMPLDSFRAKEGEQ
KGEEMEKLTWPNADSKKRIRMDSYTSYCNAVSDLHSASEIDMSVKAEMG
LGDRKGSNGSLEEWYDQDKPEVSLLFQFLQILTACFGSFAHGGNDVSNA
IGPLVALYLVYDTGDVSSKVATPIWLLLYGGVGICVGLWVWGRRVIQTM
GKDLTPITPSSGFSIELASALTVVIASNIGLPISTTHCKVGSVVSVGWL
RSKKAVDWRLFRNIFMAWFVTVPISGVISAAEVIAIFRYVILRM.

[0213] In some embodiments, a capture domain comprises a fragment of SLC20A1, having an amino acid sequence of any one of SEQ ID NOs: 117 and 118. In some embodiments, a capture domain comprises SLC20A1 or a fragment or derivative thereof, having an amino acid sequence of SEQ ID NO: 116 with a mutation of Asp-550 to lysine, arginine, glycine, alanine, or histidine. In some embodiments, a capture domain comprises SLC20A1 or a fragment or derivative thereof, having an amino acid sequence of SEQ ID NO: 117 with a mutation of Asp-20 to lysine, arginine, glycine, alanine, or histidine.

[0214] In some embodiments, the capture domain comprising SLC20A1, or a fragment or derivative thereof, comprises an amino acid sequence selected from any one of SEQ ID NOs: 116-118. In some embodiments, the capture domain comprising SLC20A1, or a fragment or derivative thereof, comprises the amino acid sequence of any one of SEQ ID Nos: 116-118 with at least 1, at least 2, at least 3, at least 4, at least 5, at least 6, at least 7, at least 8, at least 9, at least 10, at least 11, at least 12, at least 13, at least 14, at least 15, at least 16, at least 17, at least 18, at least 19, at least 20, at least 21, at least 22, at least 23, at least 24, at least 25 or more amino acid mutations. In some embodiments, the capture domain comprising SLC20A1, or fragment thereof, comprises a sequence with at least 90%, at least 95%, at least 97%, or at least 99% identity to any one of SEQ ID NOs: 116-118.

[0215] In some embodiments, a capture domain of a purification matrix provided herein comprises SLC20A2, or a fragment or derivative thereof. In some embodiments, a capture domain comprising SLC20A2or a fragment or derivative thereof binds to a GaLV virus particle. SLC20A2 (see, e.g., Uniprot Accession No. Q08357) is a sodium-phosphate symporter, which confers human cells susceptibility to GaLV. The amino acid sequence of SLC20A2 is:

(SEQ ID NO: 119)
(M)AMDEYLWMVILGFITAFILAFSVGANDVANSFGTAVGSGVVTLRQA
CILASIFETTGSVLLGAKVGETIRKGIIDVNLYNETVETLMAGEVSAMV
GSAVWQLIASFLRLPISGTHCIVGSTIGFSLVAIGTKGVQWMELVKIVA
SWFISPLLSGFMSGLLFVLIRIFILKKEDPVPNGLRALPVFYAATIAIN
VFSIMYTGAPVLGLVLPMWAIALISFGVALLFAFFVWLFVCPWMRRKIT
GKLQKEGALSRVSDESLSKVQEAESPVFKELPGAKANDDSTIPLTGAAG
ETLGTSEGTSAGSHPRAAYGRALSMTHGSVKSPISNGTFGFDGHTRSDG
HVYHTVHKDSGLYKDLLHKIHIDRGPEEKPAQESNYRLLRRNNSYTCYT
AAICGLPVHATFRAADSSAPEDSEKLVGDTVSYSKKRLRYDSYSSYCNA
VAEAEIEAEEGGVEMKLASELADPDQPREDPAEEEKEEKDAPEVHLLFH
FLQVLTACFGSFAHGGNDVSNAIGPLVALWLIYKQGGVTQEAATPVWLL
FYGGVGICTGLWVWGRRVIQTMGKDLTPITPSSGFTIELASAFTVVIAS
NIGLPVSTTHCKVGSVVAVGWIRSRKAVDWRLFRNIFVAWFVTVPVAGL
FSAAVMALLMYGILPYV.

[0216] In some embodiments, a capture domain comprises the extracellular domain of SLC20A2, having an amino acid sequence of SEQ ID NO: 120. In some embodiments, a capture domain comprises SLC20A2 or a fragment or derivative thereof, having an amino acid sequence of SEQ ID NO: 119 with a mutation of Lys-522 to aspartate, glycine, alanine, glutamate, or histidine. In some embodiments, a capture domain comprises SLC20A2 or a fragment or derivative thereof, having an amino acid sequence of SEQ ID NO: 120 with a mutation of Lys-20 to aspartate, glycine, alanine, glutamate, or histidine.

[0217] In some embodiments, the capture domain comprising SLC20A2, or a fragment or derivative thereof, comprises an amino acid sequence selected from any one of SEQ ID NOs: 119-120. In some embodiments, the capture domain comprising SLC20A2, or a fragment or derivative thereof, comprises the amino acid sequence of any one of SEQ ID Nos: 119-120 with at least 1, at least 2, at least 3, at least 4, at least 5, at least 6, at least 7, at least 8, at least 9, at least 10, at least 11, at least 12, at least 13, at least 14, at least 15, at least 16, at least 17, at least 18, at least 19, at least 20, at least 21, at least 22, at least 23, at least 24, at least 25 or more amino acid mutations. In some embodiments, the capture domain comprising SLC20A2, or fragment thereof, comprises a sequence with at least 90%, at least 95%, at least 97%, or at least 99% identity to any one of SEQ ID NOs: 119-120.

[0218] In some embodiments, the capture domain binds a coronavirus particle. In some embodiments, the capture domain binds to SARS-CoV-2 or SARS-CoV. SARS-CoV-2 and SARS-CoV enter host cells via angiotension-converting enzyme 2 (ACE2).

[0219] In some embodiments, a capture domain of a purification matrix provided herein comprises ACE2, or a fragment or derivative thereof. In some embodiments, a capture domain comprising ACE2 or a fragment or derivative thereof binds to a SARS-CoV or SARS-CoV-2 virus particle. ACE2 (see, e.g., Uniprot Accession No. Q9BYF1) is a carboxypeptidase of the renin-angiotensin hormone system. The amino acid sequence of ACE2 is:

(SEQ ID NO: 121)
(M)SSSSWLLLSLVAVTAAQSTIEEQAKTFLDKENHEAEDLEYQSSLAS
WNYNTNITEENVQNIVINNAGDKWSAFLKEQSTLAQMYPLQEIQNLTVK
LQLQALQQNGSSVLSEDKSKRLNTILNTMSTIYSTGKVCNPDNPQECLL
LEPGLNEIMANSLDYNERLWAWESWRSEVGKQLRPLYEEYVVLKNEMAR
ANHYEDYGDYWRGDYEVNGVDGYDYSRGQLIEDVEHTFEEIKPLYEHLH
AYVRAKLMNAYPSYISPIGCLPAHLLGDMWGRFWTNLYSLTVPFGQKPN
IDVTDAMVDQAWDAQRIFKEAEKFFVSVGLPNMTQGFWENSMLTDPGNV
QKAVCHPTAWDLGKGDFRILMCTKVTMDDFLTAHHEMGHIQYDMAYAAQ
PFLLRNGANEGFHEAVGEEVISLSAATPKHLKSIGLLSPDFQEDNETEI
NFLLKQALTIVGTLPFTYMLEKWRWMVFKGEIPKDQWMKKWWEMKREIV
GVVEPVPHDETYCDPASLFHVSNDYSFIRYYTRTLYQFQFQEALCQAAK
HEGPLEIKCDISNSTEAGQKLFNMLRLGKSEPWTLALENVVGAKNIVIN
VRPLLNYFEPLFTWLKDQNKNSFVGWSTDWSPYADQSIKVRISLKSALG
DKAYEWNDNEMYLFRSSVAYAMRQYFLKVKNQMILFGEEDVRVANLKPR
ISENEFVTAPKNVSDIIPRTEVEKAIRMSRSRINDAFRLNDNSLEFLGI
QPTLGPPNQPPVSIWLIVEGVVMGVIVVGIVILIFTGIRDRKKKNKARS
GENPYASIDISKGENNPGFQNTDDVQTSF.

[0220] In some embodiments, a capture domain comprises the extracellular domain of ACE2 or a fragment thereof. In some embodiments, a capture domain comprises the extracellular domain of ACE2 or a fragment thereof, having an amino acid sequence of any one of SEQ ID NOs: 122-124. In some embodiments, a capture domain comprises ACE2 or a fragment or derivative thereof, having an amino acid sequence of SEQ ID NO: 121 with one or more mutations selected from K419E, K419D, K419H, K419G, K419A, N89G, and N89A. In some embodiments, a capture domain comprises ACE2 or a fragment or derivative thereof, having an amino acid sequence of SEQ ID NO: 121 with one or more mutations of K31, H34, E35, N90, E208, H374, H378 to any amino acid selected from arginine, lysine, glutamic acid, aspartic acid, histidine, alanine, glycine, serine, threonine, and tryptophan.

[0221] In some embodiments, a capture domain comprises ACE2 or a fragment or derivative thereof, having an amino acid sequence of SEQ ID NO: 122 with one or more mutations selected from K403E, K403D, K403H, K403G, K403A, N73G, and N73A. In some embodiments, a capture domain comprises ACE2 or a fragment or derivative thereof, having an amino acid sequence of SEQ ID NO: 123 with one or more mutations selected from K402E, K402D, K402H, K402G, K402A, N72G, and N72A. In some embodiments, a capture domain comprises ACE2 or a fragment or derivative thereof, having an amino acid sequence of SEQ ID NO: 124 with a mutation of N72G or N72A.

[0222] In some embodiments, the capture domain comprising ACE2, or a fragment or derivative thereof, comprises an amino acid sequence selected from any one of SEQ ID NOs: 121-124. In some embodiments, the capture domain comprising ACE2, or a fragment or derivative thereof, comprises the amino acid sequence of any one of SEQ ID Nos: 121-124 with at least 1, at least 2, at least 3, at least 4, at least 5, at least 6, at least 7, at least 8, at least 9, at least 10, at least 11, at least 12, at least 13, at least 14, at least 15, at least 16, at least 17, at least 18, at least 19, at least 20, at least 21, at least 22, at least 23, at least 24, at least 25 or more amino acid mutations. In some embodiments, the capture domain comprising ACE2, or fragment thereof, comprises a sequence with at least 90%, at least 95%, at least 97%, or at least 99% identity to any one of SEQ ID NOs: 121-124.

[0223] In some embodiments, the biologic has a size from about 0.001 μm to about 500 μm in diameter or length. In some embodiments, the biologic has a diameter between 1 nm and 100 μm, inclusive of the endpoints. In some embodiments, the biologic has a diameter between 1 nm and 100 nm, inclusive of the endpoints. In some embodiments, the biologic has a diameter between 100 nm and 1 μm, inclusive of the endpoints. In some embodiments, the biologic has a diameter between 1 μm and 50 μm, inclusive of the endpoints. In some embodiments, the biologic has a diameter between 50 μm and 100 μm, inclusive of the endpoints.

[0224] In some embodiments, the size (i.e., diameter or length) of the biologic is about 0.001 μm, about 0.002 μm, about 0.003 μm, about 0.004 μm, about 0.005 μm, about 0.006 μm, about 0.007 μm, about 0.008 μm, about 0.009 μm, about 0.010 μm, about 0.020 μm, about 0.030 μm, about 0.040 μm, about 0.050 μm, about 0.060 μm, about 0.070 μm, about 0.080 μm, about 0.090 μm, about 0.1 μm, about 0.2 μm, about 0.3 μm, about 0.4 μm, about 0.5 μm, about 0.6 μm, about 0.7 μm, about 0.8 μm, about 0.9 μm, about 1 μm, about 2μm, about 3 μm, about 4μm, about 5 μm, about 6μm, about 7 μm, about 8μm, about 9μm, about 10 μm, about 11 μm, about 12 μm, about 13 μm, about 14 μm, about 15 μm, about 16 μm, about 17 μm, about 18 μm, about 19 μm, about 20 μm, about 21 μm, about 22 μm, about 22 μm, about 23 μm, about 24 μm, about 25 μm, about 26 μm, about 27 μm, about 28 μm, about 29 μm, about 30 μm, about 31 μm, about 32 μm, about 33 μm, about 34 μm, about 35 μm, about 36 μm, about 37 μm, about 38 μm, about 39 μm, about 40 μm, about 41 μm, about 42 μm, about 43 μm, about 44 μm, about 45 μm, about 46 μm, about 47 μm, about 48 μm, about 49 μm, about 50 μm, about 55 μm, about 60 μm, about 65 μm, about 70 μm, about 75 μm, about 80 μm, about 85 μm, about 90 μm, about 95 μm, about 100 μm, about 150 μm, about 200 μm, about 250 μm, about 300 μm, about 350 μm, about 400 μm, about 450 μm, or about 500 μm, or greater, including all values and ranges in between. In some embodiments, the biologic has a size of greater than or equal to 10 μm. In some embodiments, the biologic has a size that is greater than or equal to 25 μm. In some embodiments, the biologic has a size that is greater than or equal to 50 μm. In some embodiments, the biologic has a size that is greater than or equal to 100 μm.

[0225] In some embodiments, the biologic has a size (i.e., molar mass) from about 2 kDa to about 1000 MDa. In some embodiments, the biologic has a molar mass of about 2 kDa, about 5 kDa, about 15 kDa, about 20 kDa, about 20 kDa, about 25 kDa, about 30 kDa, about 35 kDa, about 40 kDa, about 45 kDa, about 50 kDa, about 55 kDa, about 60 kDa, about 65 kDa, about 70 kDa, about 75 kDa, about 80 kDa, about 85 kDa, about 90 kDa, about 95 kDa, about 100 kDa, about 150 kDa, about 200 kDa, about 250 kDa, about 300 kDa, about 350 kDa, about 400 kDa, about 450 kDa, about 500 kDa, about 550 kDa, about 600 kDa, about 650 kDa, about 700 kDa, about 750 kDa, about 800 kDa, about 850 kDa, about 900 kDa, about 950 kDa, about 1000 kDa, about 1 MDa, about 5 MDa, about 10 MDa, about 15 MDa, about 20 MDa, about 25 MDa, about 50 MDa, about 75 MDa, about 100 MDa, about 125 MDa, about 150 MDa, about 175 MDa, about 200 MDa, about 225 MDa, about 250 MDa, about 275 MDa, about 300 MDa, about 325 MDa, about 350 MDa, about 400 MDa, about 425 MDa, about 450 MDa, about 500 MDa, about 550 MDa, about 600 MDa, about 650 MDa, about 700 MDa, about 750 MDa, about 800 MDa, about 850 MDa, about 900 MDa, about 950 MDa, or about 1000 MDa, including all values and ranges therebetween.

[0226] In some embodiments, the capture domain comprises an amino acid sequence selected from the group consisting of:

(a)
(SEQ ID NO: 24)
VDNKFNKEQQNAFYEILHLPNLNEEQRNAFIQSLK
DDPSQSANLLAEAKKLNDAQAPK;
(b)
(SEQ ID NO: 25)
VDNKFNKEQQNAFYEILSLPNLNEEQRAAFIQSLK
DDPSQSANLLAEAKKLNDAQAPKG
(c)
(SEQ ID NO: 26)
VDNKFNKEHQNAFYEILHLPNLNEEQRNAFIQSLK
HDPSQSANLLAEAKKLNDAQAPKG;
(d)
(SEQ ID NO: 27)
AQHDEAQQNAFYQVLNMPNLNADQRNGFIQSLKDD
PSQSANVLGEAQKLNDSQAPKADAQQNKFNKDQQ
SAFYEILNMPNLNEEQRNGFIQSLKDDPSQSTNV
LGEAKKLNESQAPKADNNFNKEQQNAFYEILNMP
NLNEEQRNGFIQSLKDDPSQSANLLAEAKKLNES
QAPKADNKFNKEOQNAFYEILHLPNLNEEQRNGF
IQSLKDDPSQSANLLAEAKKLNDAQAPKADNKFN
KEQQNAFYEILHLPN;
(e)
(SEQ ID NO: 28)
TYKLILNGKTLKGETTTEAVDAATAEKVFKQYAND
NGVDGEWTYDDATKTFTVTEG;
(f)
(SEQ ID NO: 29)
KTDTYKLILNGKTLKGETTTEAVDAATAEKVFKQY
ANDNGVDGEWTYDDATKTFTVTEKPEVIDASELT
PAVTTYKLVINGKTLKGETTTKAVDAETAEKAFK
QYANDNGVDGVWTYDDATKTFTVTEMVTEVPGDA
PTEPEKPEASIPLVPLTPATPIAKDDAKKDDTKK
EDAKKPEAKKDDAKKAET;
(g)
(SEQ ID NO: 30)
KEETPETPETDSEEEVTIKANLIFANGSTQTAEFK
GTFEKATSEAYAYADTLKKDNGEYTVDVADKGYT
LNlKFAG;
(h)
(SEQ ID NO: 31)
GYVS(R/H/K)(R/HXP/S);
(i)
(SEQ ID NO: 32)
SDVQLQESGPDLVKPSQSLSLTCTVTGYSITSGYT
WHWIRQFPGNKQEWGYIHFSGYTNYNPSLKSRVS
ITRDTSKNQFFLHLNSVTTEDTATYYCARGDYGY
EWFTYWGQGTLVTVSADIQMTQSSSSFSVSLGDR
VTITCKASEDIHNRLAWYKQKPGNAPRLLISGAT
SLETGVPSRFSGSGSGKDYTLSITSLQNEDVATY
YCQQYWIGPFTFGSGTNLEIK
j)
(SEQ ID NO: 33)
GYVSRHPGGGC;
(k)
(SEQ ID NO: 34)
GYVSRHPGGGGS;
(l)
(SEQ ID NO: 35)
FHENWPSGGGC;
(m)
(SEQ ID NO: 36)
FHENWPSGGGGS;
(n)
(SEQ ID NO: 37)
GVVTINP;
(o)
(SEQ ID NO: 38)
GLVTPSG;
(p)
(SEQ ID NO: 39)
GYVSHRS;
(q)
(SEQ ID NO: 40)
KVWILTP;
(r)
(SEQ ID NO: 41)
KLWVIPQ
(s)
(SEQ ID NO: 42)
GVSAGESVQITLPKNEVQLNAYVLQEPPKGETYTY
DWQLITHPRDYSGEMEGKHSQILKLSKLTPGLYEF
KVIVEGQNAHGEGYVNVTVKPEPRKNRPPIAIVSP
QFQEISLPTTSTVIDGSQSTDDDKIVQYHWEELKG
PLREEKISEDTAILKLSKLVPGNYTFSLTVVDSDG
ATNSTTANLTVNKAVDYPPVANAGPNQVITLPQNS
ITLFGNQSTDDHGITSYEWSLSPSSKGKVVEMQGV
RTPTLQLSAMQEGDYTYQLTVTDTIGQQATAQVTV
IVQPENNKPPQADAGPDKELTLPVDSTTLDGSKSS
DDQKIISYLWEKTQGPDGVQLENANSSVATVTGLQ
VGTYVFTLTVKDERNLQSQSSVNVIVKEEINKPPI
AKITGNVVITLPTSTAELDGSKSSDDKGIVSYLWT
RDEGSPAAGEVLNHSDHHPILFLSNLVEGTYTFHL
KVTDAKGESDTDRTTVEVKPDPRG
(t)
(SEQ ID NO: 43)
SAGESVQITLPKNEVQLNAYVLQEPPKGETYTYDW
QLITHPRDYSGEMEGKHSQILKLSKLTPGLYEFKV
IVEGQNAHGEGYVNVTVKPE
(u)
(SEQ ID NO: 44)
IAIVSPQFQEISLPTTSTVIDGSQSTDDDKIVQYH
WEELKGPLREEKISEDTAILKLSKLVPGNYTFSLT
VVDSDGATNSTTANLTVNKA
(v)
(SEQ ID NO: 45)
MGVSAGESVQITLPKNEVQLNAYVLQEPPKGETYT
YDWQLITHPRDYSGEMEGKHSQILKLSKLTPGLYE
FKVIVEGQNAHGEGYVNVTVKPEPRKNRPPIAIVS
PQFQEISLPTTSTVIDGSQSTDDDKIVQYHWEELK
GPLREEKISEDTAILKLSKLVPGNYTFSLTVVDSD
GATNSTTANLTVNKA
(w)
(SEQ ID NO: 46)
VANAGPNQVITLPQNSITLFGNQSTDDHGITSYEW
SLSPSSKGKVVEMQGVRTPTLQLSAMQEGDYTYQL
TVTDTIGQQATAQVTVIVQPE
(x)
(SEQ ID NO: 47)
QADAGPDKELTLPVDSTTLDGSKSSDDQKIISYLW
EKTQGPDGVQLENANSSVATVTGLQVGTYVFTLTV
KDERNLQSQSSVNVIVKEE
(y)
(SEQ ID NO: 48)
IAKITGNVVITLPTSTAELDGSKSSDDKGIVSYLW
TRDEGSPAAGEVLNHSDHHPILFLSNLVEGTYTFH
LKVTDAKGESDTDRTTVEVKPDP,
and
(z)
(SEQ ID NO: 49)
LAEAKVLANRELDKYGVSDYYKNLINNAKTVEGVK
ALIDEILAALP.

[0227] In some embodiments, the capture domain comprises an amino acid sequence selected from any one of SEQ ID Nos: 24-49, 62-148, 167-171. In some embodiments, the capture domain comprises an amino acid sequence with at least 90%, at least 95%, at least 96%, at least 97%, at least 98%, at least 99% identity to any one of SEQ ID Nos: 24-49, 62-148, and 167-171.

[0228] In some embodiments, the capture domain comprises an amino acid sequence lacking the N-terminal methionine of any one of SEQ ID Nos: 24-49, 62-148, and 167-171.

[0229] In some embodiments, the capture domain binds a contaminant. In some embodiments, the contaminant is a biologic. In some embodiments, the contaminant is selected from the group consisting of a solvent, an endotoxin, a protein, a peptide, a nucleic acid, a virus, and a carbohydrate.

[0230] In some embodiments, the capture domain comprises a signal peptide.

[0231] In some embodiments, the number of capture domains within a protein-based purification matrix ranges from 1 to about 100. In some embodiments, the number of capture domains is about 1, about 5, about 10, about 20, about 30, about 40, about 50, about 55, about 60, about 65, about 70, about 75, about 80, about 85, about 90, about 95, or about 100. In some embodiments, a single polypeptide with phase behavior may be coupled to multiple capture domains, such as about 1 to 100 capture domains.

[0232] In some embodiments, a protein-based purification matrix may have two or more capture domains that each individually bind to different biologics, contaminants, or other molecules.

[0233] In some embodiments, the affinity of a capture domain for a biologic, contaminant, and/or other molecule is modulated to facilitate separation of the biologic from the protein-based purification matrix.

[0234] In some embodiments, the capture domain is selected from the group consisting of protein A, protein G, and protein L, or a fragment or derivative thereof. In some embodiments, the capture domain is an antibody or fragment thereof (e.g., a Fab). In some embodiments, the antibody fragment thereof is a single-chain variable fragment.

Polypeptides with Phase Behavior

[0235] The compositions and methods disclosed herein may employ one or more polypeptides with phase behavior.

[0236] In some embodiments, the polypeptide with phase behavior is a resilin-like polypeptide (RLP). Resilin-like polypeptides are elastomeric polypeptides with mechanical properties including desirable resilience, compressive elastic modulus, tensile elastic modulus, shear modulus, extension to break, maximum tensile strength, hardness, rebound, and compression set. In some embodiments, the resilin-like polypeptides described herein are polymers which comprise one or more repeats. In some embodiments, the polymeric repeats may have an amino acid sequence selected from any one of SEQ ID NOS: 1-9.

[0237] In some embodiments, a resilin-like polypeptide comprises more than one type of repeat, e.g. a repeat of SEQ ID NO: 1 and a repeat of SEQ ID NO: 3.

[0238] In some embodiments, the resilin-like polypeptides described herein comprise repeats that occur up to 500 times within a given RLP. In some embodiments, the repeats occur about 1, about 2, about 3, about 4, about 5, about 6, about 7, about 8, about 9, about 10, about 20, about 30, about 40, about 50, about 60, about 70, about 80, about 90, about 100, about 110, about 120, about 130, about 140, about 150, about 160, about 170, about 180, about 190, about 200, about 210, about 220, about 230, about 240, about 250, about 260, about 270, about 280, about 290, about 300, about 310, about 320, about 330, about 340, about 350, about 360, about 370, about 380, about 390, about 400, about 450, or about 500 times.

[0239] In some embodiments, the RLP comprises one or more partial repeats. In some embodiments, the length of a partial repeat is 1, 2, 3, 4, 5, 6, 7, 8, 9, 10, or more amino acids. In some embodiments, the RLP comprises one or more additional amino acids at the N-terminus or C-terminus of the RLP that are not part of a repeat.

[0240] In some embodiments, one or more RLP repeats are scrambled, i.e., they contain a different amino acid sequence but retain the same amino acid composition. For example, a repeat may have a different amino acid sequence than SEQ ID NO: 8, but retain the same amino acid composition.

[0241] In some embodiments, the polypeptide with phase behavior is an elastin-like polypeptide. Elastin-like polypeptides (ELPs) are biopolymers derived from tropoelastin. In some embodiments, the elastin-like polypeptides described herein are polymers comprising a pentapeptide repeat having the sequence (Val-Pro-Gly-Xaa-Gly)ₙ (SEQ ID NO: 10). In some embodiments, n is 1, 2, 3, 4, 5, 6, 7, 8, 9, 10, 11, 12, 13, 14, 15, 16, 17, 18, 19, 20, 21, 22, 23, 24, 25, 26, 27, 28, 29, 30, 31, 32, 33, 34, 35, 36, 37, 38, 39, 40, 41, 42, 43, 44, 45, 46, 47, 48, 49, 50, 51, 52, 53, 54, 55, 56, 57, 58, 59, 60, 61, 62, 63, 64, 65, 66, 67, 68, 69, 70, 71, 72, 73, 74, 75, 76, 77, 78, 79, 80, 81, 82, 83, 84, 85, 86, 87, 88, 89, 90, 91, 92, 93, 94, 95, 96, 97, 98, 99, 100, 101, 102, 103, 104, 105, 106, 107, 108, 109, 110, 111, 112, 113, 114, 115, 116, 117, 118, 119, 120, 121, 122, 123, 124, 125, 126, 127, 128, 129, 130, 131, 132, 133, 134, 135, 136, 137, 138, 139, 140, 141, 142, 143, 144, 145, 146, 147, 148, 149, 150, 160, 170, 180, 190, 200, 210, 220, 230, 240, 250, 260, 270, 280, 290, 300, 310, 320, 330, 340, 350, 360, 370, 380, 390, 400, 410, 420, 430, 440, 450, 460, 470, 480, 490, or 500, including all values and ranges in between.

[0242] In some embodiments, the pentapeptide repeat is scrambled, for example it comprises a different amino acid sequence but maintains the same amino acid composition. For example, an ELP may comprise a different amino acid sequence than SEQ ID NO: 10, but maintains the same amino acid composition, e.g. 40% of the sequence is glycine, 20% of the sequence is Xaa, 20% of the sequence is proline, and 20% of the sequence is valine.

[0243] In some embodiments, the ELP comprises one or more partial repeats. In some embodiments, the length of a partial repeat is 1, 2, 3, or 4 amino acids. In some embodiments, the ELP comprises one or more additional amino acids at the N-terminus or C-terminus of the ELP that are not part of a repeat.

[0244] ELPs and RLPs undergo a phase transition in response to an environmental factor. ELPs and RLPs retain their ability to undergo a phase transition when coupled to one or more polypeptides (such as one or more capture domains), or expressed as a fusion protein with one or more other polypeptides (such as one or more capture domains). Polymers like ELPs and RLPs exhibit a transition temperature (Tₜ), also referred to as a cloud point temperature (T_{c}). In some embodiments ELPs and RLPs undergo a reversible phase transition from a soluble to an insoluble phase at the Tₜ. ELPs that transition from a soluble to an insoluble phase with heating or an increase in salt concentration have a Tₜ referred to as a lower critical solution temperature (LCST). RLPs that transition from a soluble to an insoluble phase with cooling or a decrease in salt concentration have a Tₜ referred to as a lower critical solution temperature (UCST). In some embodiments, the phase transition results from a change in secondary structure of the ELP and/or RLP. For example, the phase transition of an ELP results from a change in secondary structure from a random coil (below the Tₜ) to a type II β-turn. In some embodiments, the change in secondary structure is characterized by a method selected from circular dichroism spectropolarimetry, small angle x-ray scattering, and cryo-electron microscopy, ultraviolet-visible spectrophotometry, static light scattering, dynamic light scattering, nuclear magnetic resonance spectroscopy, solid-state nuclear magnetic resonance spectroscopy, infrared spectroscopy, Fourier transform infrared spectroscopy (FTIR), microscopy, and small angle neutron scattering. In some embodiments, the phase transition of an ELP does not result from a chance in secondary structure.

[0245] In some embodiments, the RLPs and ELPs described herein have a transition temperature between about 0° C. and about 100° C. In some embodiments, the RLPs and ELPs described herein have a transition temperature between about 10° C. and about 50° C. In some embodiments the transition temperature is about 0° C., about 1° C., about 2° C., about 3° C., about 4° C., about 5° C., about 6° C., about 7° C., about 8° C., about 9° C., about 10° C., about 11° C., about 12° C., about 13° C., about 14° C., about 15° C., about 16° C., about 17° C., about 18° C., about 19° C., about 20° C., about 21° C., about 22° C., about 23° C., about 24° C., about 25° C., about 26° C., about 27° C., about 28° C., about 29° C., about 30° C., about 31° C., about 32° C., about 33° C., about 34° C., about 35° C., about 36° C., about 37° C., about 38° C., about 39° C., about 40° C., about 41° C., about 42° C., about 43° C., about 44° C., about 45° C., about 46° C., about 47° C., about 48° C., about 49° C., about 50° C., about 51° C., about 52° C., about 53° C., about 54° C., about 55° C., about 56° C., about 57° C., about 58° C., about 59° C., about 60° C., about 61° C., about 62° C., about 63° C., about 64° C., about 65° C., about 66° C., about 67° C., about 68° C., about 69° C., about 70° C., about 71° C., about 72° C., about 73° C., about 74° C., about 75° C., about 76° C., about 77° C., about 78° C., about 79° C., about 80° C., about 81° C., about 82° C., about 83° C., about 84° C., about 85° C., about 86° C., about 87° C., about 88° C., about 89° C., about 90° C., about 91° C., about 92° C., about 93° C., about 94° C., about 95° C., about 96° C., about 97° C., about 98° C., about 99° C., or about 100° C. In some embodiments, the RLPs described herein have a transition temperature from about 10° C. to about 100° C.

[0246] In some embodiments, the Tₜ of the RLPs and ELPs described herein is modulated by manipulating the primary structure e.g. amino acid sequence of the RLP and ELP. In some embodiments, the hydrophobicity of the ELP or RLP is modulated. In some embodiments, the hydrophobicity of the ELP is modified by altering the identity of the guest residue Xaa. In some embodiments, the hydrophobicity of the ELP or RLP is increased resulting in a decreased Tₜ. In some embodiments, the hydrophobicity of the ELP or RLP is decreased resulting in an increased Tₜ. In some embodiments, the polarity of the ELP or RLP is modulated. In some embodiments, the polarity of the ELP is modulated by altering the identity of the guest residue Xaa. In some embodiments, the polarity of the ELP or RLP is increased resulting in an increased Tₜ. In some embodiments, the polarity of the ELP or RLP is decreased resulting in a decreased Tₜ.

[0247] In some embodiments, the number of ELP pentapeptide repeats (n) is modulated to alter the Tₜ. In some embodiments, n of the pentapeptide repeat (Val-Pro-Gly-Xaa-Gly)ₙ (SEQ ID NO: 10) is an integer from 1 to 500, inclusive of endpoints. In some embodiments, n is 1, 2, 3, 4, 5, 6, 7, 8, 9, 10, 11, 12, 13, 14, 15, 16, 17, 18, 19, 20, 21, 22, 23, 24, 25, 26, 27, 28, 29, 30, 31, 32, 33, 34, 35, 36, 37, 38, 39, 40, 41, 42, 43, 44, 45, 46, 47, 48, 49, 50, 51, 52, 53, 54, 55, 56, 57, 58, 59, 60, 61, 62, 63, 64, 65, 66, 67, 68, 69, 70, 71, 72, 73, 74, 75, 76, 77, 78, 79, 80, 81, 82, 83, 84, 85, 86, 87, 88, 89, 90, 91, 92, 93, 94, 95, 96, 97, 98, 99, 100, 101, 102, 103, 104, 105, 106, 107, 108, 109, 110, 111, 112, 113, 114, 115, 116, 117, 118, 119, 120, 121, 122, 123, 124, 125, 126, 127, 128, 129, 130, 131, 132, 133, 134, 135, 136, 137, 138, 139, 140, 141, 142, 143, 144, 145, 146, 147, 148, 149, 150, 160, 170, 180, 190, 200, 210, 220, 230, 240, 250, 260, 270, 280, 290, 300, 310, 320, 330, 340, 350, 360, 370, 380, 390, 400, 410, 420, 430, 440, 450, 460, 470, 480, 490, or 500, including all values and ranges in between.

[0248] In some embodiments, Xaa also referred to herein as “the guest residue” is any amino acid that does not eliminate the phase behavior of the ELP. In some embodiments, Xaa is any amino acid except proline. In some embodiments, Xaa is independently selected for each repeat. For example, a given ELP may contain the guest residues alanine, glycine, and valine at a ratio of 8:7:1. In some embodiments Xaa is selected from the group consisting of alanine, arginine, asparagine, aspartic acid, cysteine, glutamic acid, glutamine, glycine, histidine, isoleucine, leucine, lysine, methionine, phenylalanine, praline, serine, threonine, tryptophan, tyrosine and valine. In some embodiments, Xaa is a non-classical amino acid selected from Table 2 and/or the group consisting of 2,4-diaminobutyric acid, α-amino-isobutyric acid, alloisoleucine, 4-aminobutyric acid, 2-amino butyric acid (Abu), γ-Abu, ε-Ahx, 6-amino hexanoic acid, 2-amino isobutyric acid (Aib), 3-amino propionic acid, ornithine, norleucine, norvaline, hydroxyproline, sarcosine, citrulline, homocitrulline, cysteic acid, t-butylglycine, t-butylalanine, phenylglycine, cyclohexylalanine, β-alanine, fluoro-amino acids, designer amino acids such as β-methyl amino acids, Cα-methyl amino acids, Na-methyl amino acids, and amino acid analogs in general. In some embodiments, Xaa is the D-isomer of a natural or non-classical amino acid.

[0249] In some embodiments, the Tₜ of the RLPs and ELPs described herein is modulated by introducing one or more environmental factors to the composition containing the RLP and/or ELP. In some embodiments, the Tₜ of the ELPs and/or RLPs is modulated by adjusting the ionic strength of solvents. In some embodiments, the ionic strength of the solvent is adjusted by adding salt. In some embodiments, ELPs and/or RLPs contain lower Tₜ in solvents containing anions categorized as kosmotropes. Anions that are kosmotropes are highly hydrated and influence the water shield on ELPs and/or RLPs. In some embodiments, the Tₜ of ELPs and/or RLPs can be adjusted through the addition of anions that are chaotropes. At low concentrations, the addition of chaotropes increase the Tₜ of the ELP and/or RLP. At high concentrations, the addition of a chaotrope decreases the Tₜ of the ELP and/or RLP. In some embodiments, the Tₜ of the ELP and/or RLP can be tuned by introducing one or more reagents that disrupts hydrogen bonds. Non-limiting examples of reagents that disrupt hydrogen bonds include sodium dodecyl sulfate (SDS) and urea. In some embodiments, reagents that enhance hydrogen bond formation are utilized to modulate the Tₜ. In some embodiments, reagents that enhance hydrophobic interactions are utilized to modulate the Tₜ. Trifluoroethanol is a reagent which enhances both hydrophobic interactions and hydrogen bond formation, causing a decrease in Tₜ.

[0250] In some embodiments, the ELP and/or RLP concentration can be adjusted to modulate Tₜ. In some embodiments, a higher ELP and/or RLP concentration results in a reduced Tₜ. In some embodiments, a lower ELP and/or RLP concentration results in an increased Tₜ.

[0251] In addition, modulation of pH, light, and ion concentrations also can be utilized to modulate Tₜ.

[0252] In some embodiments, modulation of the number of (e.g. addition or removal) charged amino acids (e.g. histidine, lysine, arginine, glutamic acid, aspartic acid, ornithine, or other non-natural charged amino acids) and identity (e.g. positively or negatively charged) enables tuning of the Tₜ through pH modulation.

[0253] In some embodiments, the ELPs and/or RLPs described herein are block copolymers. A block copolymer comprises two or more sequence domains or blocks, in which two or more blocks contain different properties. Non-limiting examples of properties that can be tuned include hydrophilicity, hydrophobicity, polarity, and secondary structure. In some embodiments, the block copolymer is an amphiphile, e.g. it comprises at least one hydrophobic and at least one hydrophilic block.

[0254] In some embodiments, the ELPs and/or RLPs described herein assemble into various morphologies. Non-limiting examples of morphologies include a spherical aggregate, a micelle, a vesicle, a fibril, a nanofibril, a nanotube, and a hydrogel. In some embodiments, the RLPs and/or ELPs described herein assemble into various morphologies after the addition of an environmental factor. In some embodiments, the RLPs and/or ELPs described herein change from one morphology to another morphology after the addition of an environmental factor. In some embodiments, the RLPs and/or ELPs described herein change from one morphology to another morphology after the addition of a biologic.

[0255] In some embodiments, addition of an environmental factor causes an RLP and/or ELP to undergo a phase transition. In some embodiments, at the RLP and/or ELP phase transition, the RLP and/or ELP converts from one morphology to another morphology.

[0256] In some embodiments, a phase transition of an RLP and/or ELP causes the formation of dense, liquid, droplets.

[0257] In some embodiments, the polypeptide with phase behavior comprises an amino acid sequence selected from the group consisting of:

(a)
(SEQ ID NO: 1)
(GRGDSPY)ₙ
(b)
(SEQ ID NO: 2)
(GRGDSPH)ₙ
(c)
(SEQ ID NO: 3)
(GRGDSPV)ₙ
(d)
(SEQ ID NO: 4)
(GRGDSPYG)ₙ
(e)
(SEQ ID NO: 5)
(RPLGYDS)ₙ
(f)
(SEQ ID NO: 6)
(RPAGYDS)ₙ
(g)
(SEQ ID NO: 7)
(GRGDSYP)ₙ
(h)
(SEQ ID NO: 8)
(GRGDSPYQ)ₙ
(i)
(SEQ ID NO: 9)
(GRGNSPYG)ₙ
(j)
(SEQ ID NO: 11)
(GVGVP)ₙ;
(k)
(SEQ ID NO: 12)
(GVGVPGLGVPGVGVPGLGVPGVGVP)ₘ;
(l)
(SEQ ID NO: 13)
(GVGVPGVGVPGAGVPGVGVPGVGVP)ₘ;
(m)
(SEQ ID NO: 14)
(GVGVPGWGVPGVGVPGWGVPGVGVP)ₘ;
(n)
(SEQ ID NO: 15)
(GVGVPGVGVPGVGVPGVGVPGVGVPGV
GVPGEGVPGFGVPGVGVP)ₘ;
(o)
(SEQ ID NO: 16)
(GVGVPGVGVPGVGVPGVGVPGVGVPGVG
VPGKGVPGFGVPGVGVP)ₘ;
and
(p)
(SEQ ID NO: 17)
(GAGVPGVGVPGAGVPGVGVPGAGVP)ₘ;

[0258] or a randomized, scrambled analog thereof;

[0259] wherein:

[0260] n is an integer in the range of 1-500, inclusive of endpoints; and

[0261] m is an integer in the range of 4-25, inclusive of endpoints.

[0262] In some embodiments, the polypeptide with phase behavior comprises an amino acid sequence of (GVGVPGVGVPGAGVPGVGVPGVGVP)ₘ (SEQ ID NO: 53) or (GVGVPGVGVPGLGVPGVGVPGVGVP)ₘ (SEQ ID NO: 55), wherein m is an integer between 2 and 32, inclusive of endpoints. In some embodiments, the polypeptide with phase behavior comprises an amino acid sequence of (GVGVPGVGVPGAGVPGVGVPGVGVP)ₘ (SEQ ID NO: 53), wherein m is 8 or 16. In some embodiments, the polypeptide with phase behavior comprises an amino acid sequence of (GVGVPGAGVP)ₘ (SEQ ID NO: 54), wherein m is an integer between 5 and 80, inclusive of endpoints. In some embodiments, the polypeptide with phase behavior comprises an amino acid sequence of (GXGVP)ₘ (SEQ ID NO: 56), wherein m is an integer between 10 and 160, inclusive of endpoints, and wherein X for each repeat is independently selected from the group consisting of glycine, alanine, valine, isoleucine, leucine, phenylalanine, tyrosine, tryptophan, lysine, arginine, aspartic acid, glutamic acid, and serine.

[0263] In some embodiments, the polypeptide with phase behavior comprises an amino acid sequence selected from

(a)
(SEQ ID NO: 52)
(GVGVP)ₘ;
(b)
(SEQ ID NO: 57)
(ZZPXXXXGZ)ₘ;
(c)
(SEQ ID NO: 58)
(ZZPXGZ)ₘ;
(d)
(SEQ ID NO: 59)
(ZZPXXGZ)ₘ;
and
(e)
(SEQ ID NO: 60)
(ZZPXXXGZ)ₘ,

wherein m is an integer between 10 and 160, inclusive of endpoints, wherein X if present is any amino acid except proline or glycine, and wherein Z if present is any amino acid.

[0264] In some embodiments, the polypeptide with phase behavior comprises an amino acid sequence of (GVGVP)ₘ (SEQ ID NO: 52), wherein m is 20, 40, or 80. In some embodiments, the polypeptide with phase behavior comprises an amino acid sequence of (GRGDXPZX)ₘ (SEQ ID NO: 61) or (XZPXDGRG)ₘ (SEQ ID NO: 62), wherein X is glutamine or serine, Z is tyrosine or valine, and m is an integer between 10 and 160, inclusive of endpoints.

[0265] In some embodiments, the polypeptide with phase behavior comprises a first set of repeat sequences and a second set of repeat sequences. The first set of repeat sequences and the second set of repeat sequences may each individually comprise sequences that are repeated one or more times. In some embodiments, the first set of repeat sequences any/or the second set of repeat sequences comprises a repeating sequence comprising any one of SEQ ID NOs: 1-17 and 52-62. In some embodiments, the polypeptide with phase behavior comprises a first set of repeat sequences and a second set of repeat sequences, wherein the first set of repeat sequences comprises the amino acid sequence of (GRGDXPZX)₄₀ (SEQ ID NO: 149) and the second set of repeat sequences comprises the amino acid sequence (GVGVP)₈₀ (SEQ ID NO: 150), wherein X is glutamine and Z is tyrosine. In some embodiments, polypeptide with phase behavior comprising a first set of repeat sequences and a second set of repeat sequences comprises the sequence of SEQ ID NO: 151 In some embodiments, the polypeptide with phase behavior comprises at least one, at least two, at least three, at least four, at least five, at least six, at least seven, at least eight, at least nine, or at least ten different sets of repeat sequences. In some embodiments, each set of repeat sequences within the polypeptide with phase behavior comprises sequences that repeat from about 5 to about 400 times, for example, about 5, about 10, about 15, about 20, about 25, about 30, about 35, about 40, about 45, about 50, about 55, about 60, about 65, about 70, about 75, about 80, about 85, about 90, about 95, about 100, about 105, about 110, about 115, about 120, about 125, about 130, about 135, about 140, about 145, about 150, about 155, about 160, about 165, about 170, about 175, about 180, about 185, about 190, about 195, about 200, about 205, about 210, about 215, about 220, about 225, about 230, about 235, about 240, about 245, about 250, about 255, about 260, about 265, about 270, about 275, about 280, about 285, about 290, about 295, about 300, about 305, about 310, about 315, about 320, about 325, about 330, about 335, about 340, about 345, about 350, about 355, about 360, about 365, about 370, about 375, about 380, about 385, about 390, about 395, or about 400 times.

[0266] In some embodiments, the polypeptide with phase behavior comprising an amino acid sequence selected from any one of SEQ ID NOs: 1-17 and 52-62 also comprises up to 10 additional N-terminal and/or C-terminal amino acids. In some embodiments, the polypeptide with phase behavior comprising an amino acid sequence of any one of SEQ ID NOs: 1-17 and 52-62 also comprises an additional N-terminal methionine. In some embodiments, the polypeptide with phase behavior comprising an amino acid sequence of any one of SEQ ID NOs: 1-17 and 52-62 also comprises an additional C-terminal glycine.

[0267] In some embodiments, the polypeptide with phase behavior has the same amino acid composition of an ELP and/or RLP but does not contain repeats. In some embodiments, the polypeptide with phase behavior comprises an amino acid sequence that is 80%, about 85%, about 90%, about 95%, about 96%, about 97%, about 98%, about 99%, or about 100% identical to an ELP and/or RLP. In some embodiments, the polypeptide with phase behavior comprises an amino acid composition that is 80%, about 85%, about 90%, about 95%, about 96%, about 97%, about 98%, about 99%, or about 100% identical to an ELP and/or RLP. In some embodiments, the polypeptide with phase behavior comprises a composition of hydrophobic amino acids that is 80%, about 85%, about 90%, about 95%, about 96%, about 97%, about 98%, about 99%, or about 100% identical to an ELP and/or RLP.

[0268] In some embodiments, the polypeptide with phase behavior comprises a non-repetitive unstructured polypeptide. In some embodiments, the non-repetitive unstructured polypeptide has an amino acid sequence that contains at least 50 amino acids. In some embodiments, the non-repetitive unstructured polypeptide has an amino acid sequence that contains at least 50, at least 60, at least 70, at least 80, at least 90, or at least 100 amino acids. In some embodiments, the sequence of the non-repetitive unstructured polypeptide is at least about 10% proline (e.g. at least 10%, 20%, 30%, 40%, 50%, 60%, 70%, or 80%) and at least 20% glycine (e.g. at least 20%, at least 30%, at least 40%, at least 50%, at least 60%, at least 70%, at least 80%, or at least 90%). In some embodiments, the non-repetitive unstructured polypeptide has a sequence that contains at least about 40% of amino acids selected from the group consisting of valine, alanine, leucine, lysine, threonine, isoleucine, tyrosine, serine, and phenylalanine.

[0269] In some embodiments, the non-repeated unstructured polypeptide comprises a sequence that does not contain three contiguous identical amino acids, wherein any 5-10 amino acid subsequence does not occur more than once in the non-repeated unstructured polypeptide, and wherein when the non-repeated unstructured polypeptide comprises a subsequence starting and ending with proline, and wherein the subsequence further comprises at least one glycine.

[0270] In some embodiments, the ELPs and/or RLPs described herein are expressed as a component of a fusion protein. In some embodiments, the fusion protein is expressed in bacteria or mammalian cells. In some embodiments, the fusion protein is expressed in Escherichia coli. In some embodiments, the fusion protein is expressed in insect cells. In some embodiments, the sequence of the non-repetitive unstructured polypeptide is at least about 10% proline (e.g. at least 10%, 20%, 30%, 40%) and at least 20% glycine (e.g. at least 20%, 30%, 40%, or 50%), and at least 40% (e.g. at least 40%, 50%, 60%, or 70%) of amino acids selected from the group consisting of valine, alanine, leucine, lysine, threonine, isoleucine, tyrosine, serine, and phenylalanine.

[0271] In some embodiments, the non-repetitive unstructured polypeptide does not contain three contiguous identical amino acids. In some embodiments, the non-repetitive unstructured polypeptide comprises a subsequence (e.g. a fragment of the non-repetitive unstructured polypeptide) which only occurs once in the non-repetitive unstructured polypeptide sequence. In some embodiments, the non-repetitive unstructured polypeptide comprises a subsequence that starts and ends with proline. In some embodiments, the non-repetitive unstructured polypeptide comprises a subsequence that contains at least one glycine.

[0272] In some embodiments, the polypeptide with phase behavior comprises a signal peptide.

[0273] In some embodiments, the polypeptide with phase behavior comprises an amino acid sequence of (GVGVPGLGVPGVGVPGLGVPGVGVP)ₘ (SEQ ID NO: 12), wherein m is 16. In some embodiments, the polypeptide with phase behavior comprises an amino acid sequence of SEQ ID NO: 164. In some embodiments, the polypeptide with phase behavior comprises an amino acid sequence of SEQ ID NO: 165.

Linkers Between Polypeptides with Phase Behavior and Capture Domains

[0274] In some embodiments, the capture domain is coupled to the polypeptide with phase behavior via a linker. In some embodiments, any linker that does not interfere with the function of the purification matrix may be utilized.

[0275] In some embodiments, the linker connects the capture domain to the polypeptide with phase behavior. In some embodiments, the linker enables cooperative interactions between the polypeptide with phase behavior and the capture domain. In some embodiments, the linker is a peptide. In some embodiments, the linker preserves the phase behavior of the polypeptide with phase behavior. In some embodiments, the linker preserves the Tₜ of the polypeptide with phase behavior. In some embodiments, the linker preserves the structure of the capture domain. In some embodiments, the linker comprises between 1 and 50 amino acids. In some embodiments, the linker comprises 1, 2, 3, 4, 5, 6, 7, 8, 9, 10, 11, 12, 13, 14, 15, 16, 17, 18, 19, 20, 21, 22, 23, 24, 25, 26, 27, 28, 29, 30, 31, 32, 33, 34, 35, 36, 37, 38, 39, 40, 41, 42, 43, 44, 45, 46, 47, 48, 49, or 50 amino acids.

[0276] In some embodiments, the stiffness of the linker is increased by the inclusion of proline in the linker amino acid sequence.

[0277] In some embodiments, the flexibility of a linker is increased by the inclusion of small polar amino acids, including threonine, serine, and glycine.

[0278] In some embodiments, the linker may adopt various secondary structures, including but not limited to α-helices, β-strands, and random coils. In some embodiments, the linker adopts an α-helix and comprises an amino acid repeat of (EAAAK)ₙ (SEQ ID NO: 18) where n is a repeat number, i.e., an integer in the range of 1 to 20, inclusive of endpoints.

[0279] In some embodiments, the linker is comprised of (G₄S)ₙ (SEQ ID NO: 19) where n can be an integer from 1 to 30 (e.g., 1, 2, 3, 4, 5, 6, 7, 8, 9, 10, 11, 12, 13, 14, 15, 16, 17, 18, 19, 20, 21, 22, 23, 24, 25, 26, 27, 28, 29, or 30). In embodiments, the polypeptide linker has a repeat of (SGGG)n (SEQ ID NO: 20), wherein n is an integer from 1 to 50 (e.g. 1, 2, 3, 4, 5, 6, 7, 8, 9, 10, 11, 12, 13, 14, 15, 16, 17, 18, 19, 20). In embodiments, the polypeptide linker has a repeat of (GGGS)ₙ (SEQ ID NO: 21), wherein n is an integer from 1 to 20 (e.g. 1, 2, 3, 4, 5, 6, 7, 8, 9, 10, 11, 12, 13, 14, 15, 16, 17, 18, 19, or 20).

[0280] In some embodiments, the linker has an amino acid sequence of KESGSVSSEQLAQFRSLD (SEQ ID NO: 22). In some embodiments, the linker has an amino acid sequence of EGKSSGSGSESKST (SEQ ID NO: 23). In some embodiments, the linker only contains glycine.

[0281] In some embodiments, the peptide linker comprises a protease cleavage site. In some embodiments, the protease cleavage site is a furin cleavage site.

[0282] In some aspects, the polypeptide linker is a poly-(Gly)ₙ linker, wherein n is an integer from 1 to 30 (e.g., 1, 2, 3, 4, 5, 6, 7, 8, 9, 10, 15, 16, 17, 18, 19, 20, 21, 22, 23, 24, 25, 26, 27, 28, 29, or 30 (SEQ ID NO: 50). In other embodiments, the linker is selected from the group consisting of: dipeptides, tripeptides, and quadripeptides. In embodiments, the linker is a dipeptide selected from the group consisting of alanine-serine (AS), leucine-glutamic acid (LE), and serine-arginine (SR).

[0283] In some embodiments, the linker is selected from GKSSGSGSESKS (SEQ ID NO: 152), GSTSGSGKSSEGKG (SEQ ID NO: 153), GSTSGSGKSSEGSGSTKG (SEQ ID NO: 154), GSTSGSGKPGSGEGSTKG (SEQ ID NO: 155), EGKSSGSGSESKEF (SEQ ID NO: 156), SRSSG (SEQ ID NO: 157), and SGSSC (SEQ ID NO: 158).

[0284] In some embodiments, the linker is a self-cleaving peptide. In some embodiments, the self-cleaving peptide is a 2A peptide. 2A peptides are a class of 18-22 amino acid long peptides that induce ribosomal skipping during translation of a protein in a cell. In some embodiments, the 2A peptide is a T2A peptide having an amino acid sequence of EGRGSLLTCGDVEENPGP (SEQ ID NO: 159), a P2A peptide having an amino acid sequence of ATNFSLLKQAGDVEENPGP (SEQ ID NO: 160), an E2A peptide having an amino acid sequence of QCTNYALLKLAGDVESNPGP (SEQ ID NO: 161), or an F2A peptide having an amino acid sequence of VKQTLNFDLLKLAGDVESNPGP (SEQ ID NO: 162). In some embodiments, the 2A peptide has at least 80%, at least 85%, at least 90%, at least 95%, or at least 98% identity to any one of SEQ ID NOs. 159-162. In some embodiments, the 2A peptide further comprises GSG (SEQ ID NO: 163) on its N-terminus.

[0285] In some embodiments, the linker is a chemical linker. In some embodiments, the chemical linker is selected from the group consisting of a carbohydrate linker, a lipid linker, a fatty acid linker, and a polyether linker.

[0286] In some embodiments, the linker is a direct covalent linkage between an amino acid residue of the polypeptide with an amino acid residue of the polypeptide with phase behavior and a capture domain. In some embodiments, a fusion protein comprises the polypeptide with phase behavior and a capture domain. In some embodiments, the fusion protein further comprises one or more linkers as described herein. In some embodiments, a fusion protein comprises, from N-terminus to C-terminus, a polypeptide with phase behavior, a linker, and a capture domain. In some embodiments, a fusion protein comprises, from N-terminus to C-terminus, a capture domain, a linker, and a polypeptide with phase behavior.

### Environmental Factors

[0287] In some embodiments, one or more environmental factors are applied to cause a change of a complex comprising the protein-based purification matrix and biologic, contaminant, and/or other molecule. In some embodiments, the one or more environmental factors cause the size of a complex comprising the protein-based purification matrix and biologic, contaminant, and/or other molecule to increase. In some embodiments, the one or more environmental factors cause the polypeptide with phase behavior to aggregate. In some embodiments, the one or more environmental factors causes separation of the protein-based purification matrix from the biologic, contaminant, and/or small molecule. In some embodiments, the one or more environmental factors enables the biologic, contaminant, and/or other molecule to retain its native structure, function, and activity.

[0288] In some embodiments, the environmental factor is a change in temperature. In some embodiments, the temperature is increased about 0.5° C., about 1° C., about 2° C., about 3° C., about 4° C., about 5° C., about 6° C., about 7° C., about 8° C., about 9° C., about 10° C., about 11° C., about 12° C., about 13° C., about 14° C., about 15° C., about 16° C., about 17° C., about 18° C., about 19° C., about 20° C., about 21° C., about 22° C., about 23° C., about 24° C., about 25° C., about 26° C., about 27° C., about 28° C., about 29° C., about 30° C., about 31° C., about 32° C., about 33° C., about 34° C., about 35° C., about 36° C., about 37° C., about 38° C., about 39° C., or about 40° C. In some embodiments, the temperature is decreased about 0.5° C., about 1° C., about 2° C., about 3° C., about 4° C., about 5° C., about 6° C., about 7° C., about 8° C., about 9° C., about 10° C., about 11° C., about 12° C., about 13° C., about 14° C., about 15° C., about 16° C., about 17° C., about 18° C., about 19° C., about 20° C., about 21° C., about 22° C., about 23° C., about 24° C., about 25° C., about 26° C., about 27° C., about 28° C., about 29° C., about 30° C., about 31° C., about 32° C., about 33° C., about 34° C., about 35° C., about 36° C., about 37° C., about 38° C., about 39° C., or about 40° C.

[0289] In some embodiments, the environmental factor is a change in pH. In some embodiments, the pH is increased by about 0.1, about 0.2, about 0.3, about 0.4, about 0.5, about 0.6, about 0.7, about 0.8, about 0.9, about 1.0, about 1.1, about 1.2, about 1.3, about 1.4, about 1.5, about 1.6, about 1.7, about 1.8, about 1.9, about 2.0, about 2.1, about 2.2, about 2.3, about 2.4, about 2.5, about 2.6, about 2.7, about 2.8, about 2.9, about 3.0, about 3.1, about 3.2, about 3.3, about 3.4, about 3.5, about 3.6, about 3.7, about 3.8, about 3.9, about 4.0, about 4.1, about 4.2, about 4.3, about 4.4, about 4.5, about 4.6, about 4.7, about 4.8, about 4.9, about 5.0, about 5.1, about 5.2, about 5.3, about 5.4, about 5.5, about 5.6, about 5.7, about 5.8, about 5.9, or about 6.0 units. In some embodiments, the pH is decreased by about 0.1, about 0.2, about 0.3, about 0.4, about 0.5, about 0.6, about 0.7, about 0.8, about 0.9, about 1.0, about 1.1, about 1.2, about 1.3, about 1.4, about 1.5, about 1.6, about 1.7, about 1.8, about 1.9, about 2.0, about 2.1, about 2.2, about 2.3, about 2.4, about 2.5, about 2.6, about 2.7, about 2.8, about 2.9, about 3.0, about 3.1, about 3.2, about 3.3, about 3.4, about 3.5, about 3.6, about 3.7, about 3.8, about 3.9, about 4.0, about 4.1, about 4.2, about 4.3, about 4.4, about 4.5, about 4.6, about 4.7, about 4.8, about 4.9, about 5.0, about 5.1, about 5.2, about 5.3, about 5.4, about 5.5, about 5.6, about 5.7, about 5.8, about 5.9, or about 6.0 units.

[0290] In some embodiments, the environmental factor is change in ionic strength. In some embodiments, the change in ionic strength is brought about by increasing the concentration of salt. In some embodiments, the change in ionic strength is brought about by decreasing the concentration of salt. Non-limiting examples of salts include sodium chloride, potassium chloride, ammonium chloride, sodium acetate, sodium citrate, copper sulfate, sodium iodide, ammonium sulfate, and sodium sulfate. In some embodiments, dialysis is used to change the concentration of salt in the composition containing the protein-based purification matrix and biologic, contaminant, and/or other molecule.

[0291] In some embodiments, the environmental factor is the addition of a cofactor. Non-limiting examples of cofactors include calcium, magnesium, cobalt, copper, zinc, iron, manganese, selenium, molybdenum, potassium, coenzyme A (CoA), a nucleoside triphosphate, and a vitamin. In some embodiments, the cofactor is calcium. In some embodiments, the nucleoside triphosphate is adenosine triphosphate, uridine triphosphate, guanosine triphosphate, cytidine triphosphate, or thymidine triphosphate. In some embodiments, the vitamin is a fat-soluble. In some embodiments, the vitamin is water-soluble. Non-limiting examples of vitamins include vitamin A, vitamin B1 (thiamine), vitamin B2 (riboflavin), vitamin B3 (niacin or niacinamide), vitamin B5 (pantothenic acid), Vitamin B6 (pyridoxine, pyridoxal, or pyridoxamine, or pyridoxine hydrochloride), vitamin B7 (biotin), vitamin B9 (folic acid), vitamin B12, vitamin C, vitamin D, Vitamin E, vitamin K, K1, and K2, folic acid, and biotin.

[0292] In some embodiments, the environmental factor is a change in the concentration of the protein-based purification matrix. In some embodiments, the environmental factor is a change in the concentration of the biologic, contaminant, and/or other molecule.

[0293] In some embodiments, the environmental factor is a change in pressure of the composition containing the protein-based purification matrix and biologic, contaminant, and/or other molecule. In some embodiments, a change in pressure can be effected by increasing or decreasing the volume of the composition.

[0294] In some embodiments, the environmental factor is the addition of one or more surfactants. In some embodiments, the one or more surfactants are selected from free fatty acid salts, soaps, fatty acid sulfonates, such as sodium lauryl sulfate, ethoxylated compounds, such as ethoxylated propylene glycol, lecithin, polygluconates, quaternary ammonium salts, lignin sulfonates, 3-((3-cholamidopropyl) dimethylammonio)-1-propanesulfonate (CHAPS), sugars, including sucrose and glucose, Triton X-100, and NP-40. In some embodiments, the surfactant is anionic, nonionic, or amphoteric.

[0295] In some embodiments, the environmental factor is the addition of one or more molecular crowding agents. Non-limiting examples of molecular crowding agents include polyethylene glycol, dextran, and ficoll. PEGS may include PEG400, PEG1450, PEG3000, PEG8000, and PEG10000.

[0296] In some embodiments, the environmental factor is the addition of one or more oxidizing agents. Non-limiting examples of oxidizing agents include hydrogen peroxide, hydrophilically or hydrophobically activated hydrogen peroxide, preformed peracids, monopersulfate or hypochlorite.

[0297] In some embodiments, the environmental factor is the addition of one or more reducing agents. In some embodiments, the one or more reducing agents is selected from the group consisting of dithiothreitol (DTT), 2-mercaptoethanol (BME), Tris (2-carboxyethyl) phosphine (TCEP), hydrazine, boron hydrides, amine boranes, lower alkyl substituted amine boranes, triethanolamine, and N,N,N′,N′-tetramethylethylenediamine (TEMED).

[0298] In some embodiments, the environmental factor is the addition of one or more denaturing agents. Non-limiting examples of denaturing agents include urea, guanidine hydrochloride, guanidine, sodium salicylate, dimethyl sulfoxide, and propylene glycol.

[0299] In some embodiments, the environmental factor is the addition of one or more enzymes. Non-limiting examples of enzymes include proteases, kinases, phosphatases, synthetases, transferases, nucleases such as restriction endonucleases, lyases, isomerases, dehydrogenases, decarboxylases, and lipases.

[0300] In some embodiments, the environmental factor is the application of electromagnetic waves. In some embodiments, the environmental factor is the application of light. In some embodiments, the electromagnetic waves have a wavelength between about 0.0001 nm and about 100 m. In some embodiments, the electromagnetic waves are selected from the group consisting of gamma rays, x-rays, ultraviolet, visible, infrared, and radio waves. In some embodiments, the electromagnetic waves are gamma rays. In some embodiments, the gamma rays have a wavelength between about 0.0001 nm and about 0.01 nm, e.g. 0.0001 nm, 0.0005 nm, 0.001 nm, 0.002 nm, 0.003 nm, 0.004 nm, 0.005 nm, 0.006 nm, 0.007 nm, 0.008 nm, 0.009 nm, and 0.01 nm. In some embodiments, the x-rays have a wavelength between about 0.01 nm and 10 nm, e.g. about 0.01 nm, 0.02 nm, 0.03 nm, 0.04 nm, 0.05 nm, 0.06 nm, 0.07 nm, 0.08 nm, 0.09 nm, 0.10 nm, 0.2 nm, 0.3 nm, 0.4 nm, 0.5 nm, 0.6 nm, 0.7 nm, 0.8 nm, 0.9 nm, 1 nm, 2 nm, 3 nm, 4 nm, 5 nm, 6 nm, 7 nm, 8 nm, 9 nm, or about 10 nm. In some embodiments, the ultraviolet radiation has a wavelength between about 10 nm about 400 nm, e.g. about 10 nm, about 20 nm, about 30 nm, about 40 nm, about 50 nm, about 60 nm, about 70 nm, about 80 nm, about 90 nm, about 100 nm, about 150 nm, about 200 nm, about 250 nm, about 280 nm, about 300 nm, about 350 nm, or about 400 nm. In some embodiments, the visible waves have a wavelength of between about 400 nm and about 800 nm, e.g. about 400 nm, about 450 nm, about 500 nm, about 550 nm, about 600 nm, about 650 nm, about 700 nm, about 750 nm, or about 800 nm. In some embodiments, the infrared radiation has a wavelength of between about 800 nm and about 0.1 cm, e.g. about 800 nm, about 1 μm, about 2 μm, about 3 μm, about 4μm, about 5 μm, about 6μm, about 7μm, about 8μm, about 9μm, about 10 μm, about 20 μm, about 30 μm, about 40 μm, about 50 μm, about 60 μm, about 70 μm, about 80 μm, about 90 μm, about 100 μm, about 200 μm, about 300 μm, about 400 μm, about 500 μm, about 600 μm, about 700 μm, about 800 μm, about 900 μm, or about 0.1 cm. In some embodiments, the radio waves has a wavelength of between about 0.1 cm and 100 m, e.g. about 0.1 cm, about 1 cm, about 10 cm, about 100 cm, about 1000 cm, about 2000 cm, about 3000 cm, about 4000 cm, about 5000 cm, about 6000 cm, about 7000 cm, about 8000 cm, about 9000 cm, or about 100 m.

[0301] In some embodiments, the environmental factor is the application of acoustic waves. In some embodiments, the acoustic waves have a frequency between about 1 Hz and 2000 kHz. In some embodiments, the acoustic waves have a frequency of about 1 Hz, about 5 Hz, about 10 Hz, about 20 Hz, about 30 Hz, about 40 Hz, about 50 Hz, about 60 Hz, about 70 Hz, about 80 Hz, about 90 Hz, about 100 Hz, about 200 Hz, about 300 Hz, about 400 Hz, about 500 Hz, about 600 Hz, about 700 Hz, about 800 Hz, about 900 Hz, about 1 kHz, about 100 kHz, about 200 kHz, about 300 kHz, about 400 kHz, about 500 kHz, about 600 kHz, about 700 kHz, about 800 kHz, about 900 kHz, about 1000 kHz, about 1100 kHz, about 1200 kHz, about 1300 kHz, about 1400 kHz, about 1500 kHz, about 1600 kHz, about 1700 kHz, about 1800 kHz, about 1900 kHz, or about 2000 kHz.

### EXAMPLES

### Example 1

### Development of Protein-Based Purification Matrices that Exhibit Phase Behavior and Bind to a Biologic

[0302] A protein-based purification matrix is generated and characterized. Initially, an expression vector comprising a sequence encoding a capture domain that binds to the Fc region of an antibody and a sequence encoding a polypeptide with phase behavior (e.g., an ELP) is generated. A fusion protein comprising the capture domain and polypeptide with phase behavior is expressed in Escherichia coli according to standard protocols. Isothermal titration calorimetry is utilized to characterized the affinity of the fusion protein for pure human immunoglobulin G (IgG). The transition temperature of the fusion protein is determined using UV-Vis spectrophotometry.

### Example 2

### Utilization of Protein-Based Purification Matrices that Exhibit Phase Behavior and Bind to a Biologic to Purify Protein

[0303] The protein-based purification matrix of Example 1 is utilized to purify an antibody such as trastuzumab (Herceptin®). Various molar ratios of protein-based purification matrix to biologic (e.g. trastuzumab) are tested to determine an optimal ratio for purification (i.e., for complete capture of the biologic). An environmental factor (e.g., addition of salt such as sodium chloride or ammonium sulfate) is applied to the composition containing the protein-based purification matrix and the biologic to cause the protein-based purification matrix increase in size.

[0304] Both tangential flow filtration and centrifugation are utilized to separate the biologic from the protein-based purification matrix. Although both centrifugation and tangential flow filtration enable separation of the biologic from the protein-based purification matrix, tangential flow filtration is preferred because it enables the rapid purification of thousands of liters of sample volume without the requirement for specialized centrifuges.

[0305] TFF is performed using standard conditions—for example, a 1.5 bar transmembrane pressure and a 960 L/m²/h cross flow rate. Standard TFF membranes are used, such as a 0.1 μm hydrophilized poly(vinylidene difluoride) (PVDF) or a 0.2 μm polyethersulfone membrane.

[0306] The pH is adjusted (for example to an acidic pH such as 2-4.5, or pH 3) to separate (i.e. elute) the protein-based purification matrix from the biologic. The purity of the biologic is characterized by size exclusion chromatography. The protein-based purification matrix is then re-used for an additional round of purification.

### Example 3

### Utilization of Protein-Based Purification Matrices that Exhibit Phase Behavior and Bind to a Biologic to Purify Cell

[0307] A protein-based purification matrix is utilized to purify T cells. The capture domain of the protein-based purification matrix specifically binds to T cells, for example, by recognizing a T-cell specific surface marker such as CD3, CD4, or CD8. Various molar ratios of protein-based purification matrix to T cell are tested to determine an optimal ratio for purification. Various environmental factors are tested, such as different salts and salt concentrations, to determine the most efficacious way of isolating T cells.

[0308] Tangential flow filtration and/or centrifugation and/or continuous centrifugation are utilized to separate the T cell from the protein-based purification matrix.

### Example 4

### Purification of AAV9 Using a Purification Matrix and Tangential Flow Filtration (TFF)

[0309] HEK293 cells producing a recombinant AAV9 vector packaging a tdTomato transgene were grown in suspension and harvested by centrifugation. 200 mL of the supernatant were treated with 10 U/mL benzonase and 0.01% pluronic acid and sterile filtered through a 0.2-micron bottle-top filter. This starting material (SM) was then mixed with 1 μM purification matrix having an amino acid sequence of SEQ ID NO: 172 and 0.6 M NaCl salt (i.e., the first environmental factor) to form an AAV-purification matrix complex.

[0310] This SM was processed in continuous fed-batch mode using a Repligen KR2i tangential-flow filtration (TFF) unit. The TFF was setup with a 20 mL retentate vessel, prepared with 50 μM purification matrix and 0.6 M NaCl, as well as a 13 cm² hollow fiber filter with 0.2-micron pores. A concentration-diafilter (CD) mode (10× concentration factor (CF), 6× diavolumes (DV) was run in permeate control with the SM and permeate pump set to equal flow rates. Once the entire 200 mL SM feed was processed, the retained material was rinsed with 6 DV of wash buffer (20 mM Tris, 0.5M NaCl). The AAV9 material, now substantially free of contaminants, was then resolubilized on ice and mixed with an equal volume of 2× Elution buffer (i.e., a second environmental factor) with the permeate valve closed. The elution buffer contained 100 mM glycine at pH 3 and 0.6 M NaCl. After 20 minutes, the recirculating sample was warmed back to room temperature and phase separated with NaCl. The permeate valve was opened and pure AAV9 was collected in a second CD mode (2× CF, 4× DV) with elution buffer diavolumes (100 mM glycine, pH 3, 0.6M NaCl). The flux and transmembrane pressure (TMP) were tracked throughout the run (FIG. 1), demonstrating a stable, efficient, and scalable process. Permeate and retentate samples were collected throughout the run for analysis of AAV loss by anti-AAV Western Blot (FIG. 2), as well as purity by host cell protein (HCP) quantification using a HEK HCP ELISA (Cygnus®) and dsDNA quantification using a Quant-iT™ picogreen assay® (Thermo Fisher®). The process enabled removal of HCPs by 2-3 log (FIG. 3) and of double stranded DNA (dsDNA) by >3 log (FIG. 4).

### Example 5

### Effect of Titer, Clarification, and Nuclease Treatment on AAV Purification

[0311] The ability of purification matrix having an amino acid sequence of SEQ ID NO: 172 to capture AAV8 particles from cell lysate or the media of suspension cultures of HEK293 cells producing AAV8 particles (referred to in FIG. 10 as “supernatant”) was tested.

[0312] A cell lysate was produced by resuspending pelleted HEK293 cells producing AAV8 particles in 0.5% Triton-X-100. The cell lysate and media evaluated contained titers of AAV particles that ranged from 1×10⁸ to 1×10⁷ viral particles per microliter (vp/μL). The ability of purification matrix to capture AAV8 particles from cell lysate treated with nuclease was also evaluated. Cell lysates that were treated with nuclease were incubated for 1 hr at 34° C. with 50 U/mL benzonase (Millipore®).

[0313] The ability of purification matrix to capture AAV8 particles from clarified cell lysate or media was also evaluated. Cell lysates and/or media were clarified by centrifugation at 13,200 rpm for 10 minutes. The supernatant was used for subsequent isolation of the AAV8 particles for 10 min at 13,200 rpm.

[0314] AAV8 particles were isolated from each sample by mixing the sample with 10 μM purification matrix and 0.6 M NaCl (i.e., a first environmental factor) and centrifuging the sample at 13,200 rpm for 10 minutes.

[0315] The pellets containing AAV-purification matrix complex were resuspended on ice in an elution buffer (i.e., second environmental factor) comprising 100 mM glycine at pH 3, warmed to room temperature, transitioned with 0.6 M salt, and then centrifuged a second time. The amount of eluted AAV8 was compared to that in the starting material, (i.e the media or cell lysate comprising AAV8 particles) using inverted terminal repeat (ITR) quantitative polymerase chain reaction (qPCR). This technique quantitates the number of AAV particles by measuring the number of ITRs using PCR. The AAV Capture Efficiency for each sample was calculated using the following equation: 100×(# of AAV8 particles captured by the purification matrix/# of AAV8 particles in the composition before purification).

[0316] The purification matrix robustly captured >98% AAV particles regardless of titer (1×10⁷ to 4×10¹⁰), clarification, nuclease treatment, or lysate versus media as the starting material (FIG. 5). Evaluation of lysate samples with and without nuclease treatment showed that nuclease treatment did not impact final eluted AAV8 particle purity when compared by silver stain SDS-PAGE (FIG. 6) and Quant-iT™ picogreen assay for dsDNA (FIG. 7).

### Example 6

### Effect of Centrifugation Speed on AAV8 Capture

[0317] Harvested media from AAV8 HEK293 suspension cell culture was mixed with 10 μM of Purification Matrix having an amino acid sequence of SEQ ID NO: 172 and 0.6 M NaCl to form an AAV-purification matrix complex. The samples were centrifuged for 10 min at relative centrifugal forces (RCF) ranging from 100 to 16,000. For each RCF, uncaptured AAV8 remaining in the supernatant was quantified using ITR qPCR and calculated as a percentage of the amount measured in the starting harvest material. The AAV Capture Efficiency was measured as 100% less the percentage remaining uncaptured in the supernatant and results showed that speeds of 500 RCF or higher yielded highly efficient AAV8 capture (FIG. 8).

### Example 7

### Stabilization of AAV2 by Purification Matrix

[0318] Adherent HEK293 cells were transfected according to a standard triple transfection method, and used to produce recombinant AAV2 particles carrying a luciferase transgene. The cells were cultured for 6 days, in the presence or absence of purification matrix having an amino acid sequence of SEQ ID NO: 172. Cells cultured in the presence of 10 μM purification matrix were compared to control cells, with each group, treatment or control, in triplicate. The culture media was collected on day 4 and replaced with an equal volume of media with or without the purification matrix additive. On day 6, the media was collected again and the cells were rinsed with PBS and harvested by scraping. The total vector genomes collected in all fractions were quantified for comparison using qPCR using primers against ITR2. Inclusion of the purification matrix in the culture media increased vector genome (vg) titers by at least 8% (FIG. 9).

### Example 8

### Stabilization of AAV8 by Purification Matrix

[0319] Media was harvested from HEK293 cells grown in suspension, wherein the cells were producing GFP-AAV8. The media was aliquoted and stored at −20° C. either with or without the addition of 100 μM of purification matrix having an amino acid sequence of SEQ ID NO: 172. As an accelerated stability study, the samples were subjected to freeze-thaw cycles (−20° C. to room temperature) and then assayed using an AAV8 ELISA (Progen), which quantifies total intact AAV particles. The quantified particles for the control and purification matrix-treated samples were normalized to the starting materials with no freeze-thaws. This data indicates that the purification matrix may enhance the resistance of AAV particles to freeze-thaw-mediated degradation and aggregation (FIG. 10).

### Example 9

### Capture of AAV8 Particles with a Purification Matrix

[0320] Media was harvested from HEK293 suspension cells producing AAV8 particles carrying a luciferase (luc) transgene. The media was contacted with 0 μM, 0.1 μM, 0.5 μM, 1 μM, 10 μM, and 50 μM purification matrix having an amino acid sequence of SEQ ID NO: 172, resulting in the formation of complexes between AAV8 particles and purification matrix. A first environmental factor (i.e. 0.6 M NaCl) was applied to increase the size of the complexes. Subsequently, the media containing the complexes was centrifuged at 13,200 revolutions per minute (rpm) for 10 minutes (min). This protocol allowed for separation of the complexes from impurities on the basis of size. Inverted terminal repeat (ITR) quantitative polymerase chain reaction (qPCR) was utilized to evaluate the amount of AAV particles captured from the media using the purification matrix compared to the amount of AAV particles in the starting material. This technique quantitates the number of AAV particles by measuring the number of ITRs using PCR. The Capture Efficiency of the purification matrix at each concentration was calculated using the following equation: 100×(# of AAV8 particles captured by the purification matrix/# of AAV8 particles in the composition before purification). FIG. 11 shows that purification matrix concentrations at or above 10 μM are sufficient for robust, >98%, virus capture.

### Example 10

### Capture of Ad5 Particles with a Purification Matrix

[0321] Media was harvested from HEK293 cells grown in suspension, wherein the cells were producing adenovirus type 5 (Ad5) particles carrying a green fluorescent protein (GFP) transgene. The media was contacted with 0 μM, 0.1 μM, 0.5 μM, 1 μM, 10 μM, and 50 μM purification matrix having an amino acid sequence of SEQ ID NO: 173, resulting in the formation of complexes between Ad5 particles and purification matrix. A first environmental factor (i.e. 0.6 M NaCl) was applied to increase the size of the complexes. Subsequently, the media containing the complexes was centrifuged at 13,200 revolutions per minute (rpm) for 10 minutes (min). This protocol allowed for separation of the complexes from impurities on the basis of size.

[0322] Flow cytometry was utilized to evaluate the amount of Ad5 particles captured from the media using the purification matrix compared to the amount of Ad5 particles in the starting material. The Capture Efficiency of the purification matrix at each concentration was calculated using the following equation: 100×(# of Ad5 particles captured by the purification matrix/# of Ad5 particles in the composition before purification). FIG. 12 shows that purification matrix concentrations at or above 10 μM are sufficient for robust, >98%, virus capture.

### Example 11

### Capture of Lentivirus Particles with a Purification Matrix

[0323] Lentivirus particles carrying a green fluorescent protein (GFP) transgene were mixed with 10 μM of purification matrix or PBS (negative control). Mixture of lentivirus particles with purification matrix having an amino acid sequence of SEQ ID NO: 174 leads to the formation of complexes between lentivirus particles and purification matrix. A first environmental factor (i.e. 0.5 M NaCl) was applied to increase the size of the complexes. The composition containing lentivirus particles and purification matrices, and the composition containing lentivirus particles and PBS were centrifuged at 13,200 revolutions per minute (rpm) for 10 minutes (min). The supernatants of each composition, which contained uncaptured lentivirus particles, were added to the media of adherent HEK293 cells for 48 hours. Subsequently, the cells were fluorescently imaged. HEK293 cells incubated with supernatant from the composition comprising lentivirus particles and PBS exhibited greater fluorescence than HEK293 cells incubated with supernatant from the composition comprising lentivirus particles and purification matrix.

[0324] Thus, more lentivirus particles were contained in the supernatant of the composition containing lentivirus particles and PBS than the composition containing lentivirus particles and purification matrix. This shows that the purification matrix captured lentivirus particles (FIG. 13).

[0325] This experiment is repeated with a purification matrix having an amino acid sequence of SEQ ID NO: 175.

### Example 12

### Capture of Human Serum Albumin (HSA) with a Purification Matrix

[0326] Human serum albumin (HSA) was contacted with a purification matrix having an amino acid sequence of SEQ ID NO: 176 for a period of time to allow complex formation. A first environmental factor was applied to the complexes (i.e. about 0.6 M NaCl) to increase the size of the complexes.

[0327] The composition comprising the HAS, purification matrix, and 0.5 M NaCl was applied to two filters, a filter with a 0.2 μm pore size and a filter with a 300 kilodalton (kDa) molecular weight cutoff. The filtrate was applied to a sodium dodecyl sulfate polyacrylamide gel electrophoresis (SDS-PAGE) gel, which was subsequently stained with a Coomassie dye.

[0328] The SDS-PAGE gel shows the presence of a band for HSA (at 66.5 kDa) in the filtrate from the 0.2 μm pore size filter and the absence of the band for HSA in the filtrate from the 300 kDa filter. The 300 kDa filter retained >90% of the HSA. Thus, capturing HSA with a purification matrix, and increasing the size of the complexes with an environmental factor increases the size of HSA such that 90% of the HSA is retained by the filter (FIG. 14).

### Example 13

### Infectivity of Ad5 Particles in the Presence of Purification Matrix

[0329] Media was harvested from HEK293 cells producing adenovirus type 5 (Ad5) particles carrying a green fluorescent protein (GFP) transgene. The media containing Ad5 particles was incubated at room temperature (about 25° C.) or 35° C. with purification matrix having an amino acid sequence of SEQ ID NO: 173, purification matrix control (having no specificity for Ad5), or PBS.

[0330] At days 0, 3, 7, and 11, post incubation, the media was harvested and administered to HEK293 cells. Flow cytometry was performed to evaluate the ability of the Ad5 particles to infect HEK293 cells, as indicated by the percentage of green fluorescing cells (labeled infectivity in FIG. 15). The infectivity for each source of Ad5 particles was normalized to that source's day 0 infectivity. The infectivity of Ad5 particles obtained from media incubated with purification matrix (labeled Purification Matrix) was higher than the infectivity of Ad5 particles obtained from media incubated with purification matrix control (labeled Matrix Control), and media incubated with PBS (labeled PBS control) after 3, 7, and 11 days (FIG. 15). Media incubated in the presence of purification matrix was more infective than media incubated in the presence of PBS (labeled control) at both room temperature and 35° C. (FIG. 16).

### Example 14

### Stabilization of Ad5 to Freeze-Thaw Cycles

[0331] Purified adenovirus type 5 (Ad5) particles carrying a green fluorescent protein (GFP) transgene were formulated in PBS with or without the addition of 10 μM purification matrix or Matrix control (no specificity for Ad5). The samples were subjected to three freeze-thaw cycles (−80° C. to room temperature). Using flow cytometry, the ability of each composition of Ad5 particles to infect HEK293 cells was quantified by counting the percentage of green fluorescing cells and normalizing the percentage of green fluorescing cells resulting from each composition to a control composition comprising Ad5 particles in the absence of purification matrix that were subjected to freeze-thaw cycles. Ad5 particles incubated with Purification Matrix had 20-40% higher infectivity compared to the Ad5-GFP particles incubated with a Matrix Control or PBS (labeled PBS control). (FIG. 17).

### Example 15

### Separation of Biologic from Contaminant Using Two Purification Matrices

[0332] A purification matrix with a lower critical solution temperature transition temperature (Tₜ) is labeled with a blue fluorescent dye and a purification matrix with an upper critical solution temperature (UCST) Tₜ is labeled with a red fluorescent dye. An environmental factor (e.g. NaCl) is added to the composition comprising both purification matrices to promote the formation of insoluble droplets of both purification matrices. Fluorescence imaging is performed to evaluate if each droplet contains a single purification matrix or both purification matrices.

[0333] The ability to form droplets containing a single purification matrix allows for separation of droplets of each purification matrix.

[0334] A first purification matrix that binds to a biologic and a second purification matrix that binds to a contaminant is added to a composition containing a biologic and a contaminant. A first complex between the biologic and first purification matrix forms. A second complex between the contaminant and second purification matrix forms. An environmental factor is added to separate the first complex from the second complex.

### Example 16

### Purification of Recombinant IgG1 Using Purification Matrices and Tangential Flow Filtration (TFF)

[0335] Starting material (SM) containing ˜4.8 g/L recombinant immunoglobulin 1 (IgG1) secreted from CHO cells was contacted with about 100 μM of purification matrix. The capture domain of the purification matrix binds to the Fc region of IgG1, resulting in a complex between purification matrix and IgG1. An environmental factor (0.6 M NaCl) was added to increase the size of the complexes.

[0336] TFF was used to concentrate the complexes and to separate the complexes from impurities. The composition comprising the complexes was applied to a 13 cm² polyethersulfone (PES) membrane which contained 0.2 μm pores. The composition was concentrated 2× and washed with a phosphate-buffered saline (PBS) wash buffer containing 0.6 M NaCl to remove impurities from the complexes. An elution buffer (7 diavolumes) was applied to the filter (50 mM sodium citrate, pH 3, 0.6M NaCl) to separate the IgG from the purification matrix. trigger release of the captured, concentrated and purified IgG1. The purity of the IgG was assessed by an SDS-PAGE gel, stained with a Coomassie dye (FIG. 18). The SDS-PAGE gel shows the high purity and recovery of the eluted IgG1.

[0337] High flux and transmembrane pressure (TMP) were maintained throughout the run (FIG. 19), indicating that the use of TFF enables a reduction in the time required to concentrate and separate a biologic from an impurity.

[0338] Size exclusion chromatography was performed to evaluate the purity of the eluted IgG1 product. The IgG1 product was applied to a TSKgel 3000sWXL column, and a mobile phase (i.e. 50 mM phosphate, 100 mM NaCl, at pH 7) was applied to the column at a 0.4 mL/min flow rate. The pure IgG1 was detected by measuring the absorbance at 230 nm. In comparison to the unpurified IgG1 composition, the pure IgG1 was >98% pure. Furthermore, the IgG1 product contained <1.5% of aggregated IgG1 (FIG. 20).

[0339] The purification process described above was repeated with antibodies of different subclasses (IgG2, IgG4, IgG1). The purity of antibodies purified from the aforementioned method was compared to antibodies purified by protein A chromatography (FIG. 21). Antibodies purified with a purification matrix exhibited less contaminant host cell proteins (HCP) than antibodies purified by protein A chromatography. Host cell proteins were quantified with a Cygnus™ CHO host cell protein (HCP) ELISA detection kit.

[0340] The purification matrices also provided higher productivity than the protein A resins used in protein A affinity chromatography (FIG. 22). Productivity was calculated as grams of antibody per unit of material (resin or purification matrix) per hour.

### Example 17

### Purification of IgG1, IgG2, and IgG4 Using a Purification Matrix

[0341] The effect of purification matrix on yield and purity of IgG1, IgG2, and IgG4 was evaluated. The following purification methods (a) and (b) were evaluated:

[0342] Purification method (a): IgG1, IgG2, or IgG4 from the supernatants of CHO cells containing secreted IgG1, IgG2, or IgG4 was purified by incubating the supernatant with the purification matrix of Example 16 to form complexes, increasing the size of the complexes by the addition of a first environmental factor (i.e., 0.6 M NaCl), separating the complexes from impurities using centrifugation, and eluting the IgG1, IgG2, or IgG4 from the purification matrix with a second environmental factor (i.e., 50 mM sodium citrate, pH 4).

[0343] Purification method (b): IgG1, IgG2, or IgG4 from the supernatants of CHO cells containing secreted IgG1, IgG2, or IgG4 was purified by incubating the supernatant with MAbSelect™ SuRe affinity chromatography resin (an alkali-stabilized protein A-derived ligand), washing with 140 mM NaCl, 10 mM phosphate buffer, and 3 mM KCl, pH 7.4, and eluting with 50 mM citrate buffer at pH 3.

[0344] Ultraviolet-visible spectrophotometry (UV-Vis) and size exclusion chromatography (SEC) were utilized to determine the yield of IgG1, IgG2, and IgG4 produced according to purification method (a) or purification method (b). Size exclusion chromatography was used to determine the amount of high molecular weight (HMW) and low molecular weight (LMW) impurities in each sample. Purification method (a) resulted in purified immunoglobulin that is more concentrated than that produced by purification method (b). Table 3 shows the yield and percentage of HMW and LMW impurities present in the purified immunoglobulin compositions of purification method (a) and purification (b). The size exclusion chromatography area under the curve (SEC AUC) concentration and yield were obtained by normalizing the area under the curve (AUC) from SEC obtained from method (a) to that of method (2). Molecule-optimized downstream process values are shown in parentheses.

TABLE 3
Yield and concentration of Immunoglobulins by method (a) versus method (b)

| | | | Plate | | | | | |
|---|---|---|---|---|---|---|---|---|
| | Cell | | Yield | | | SEC | | |
| | culture | Concentration | as | | | Chromatogram | | |
| | harvest | (g/L) as | determined | | | AUC Analysis | | |
| | (CCH) | determined | by UV- | SEC AUC | SEC AUC | Peak | Peak | Peak |
| | titer | by | Vis | Concentration | Yield | Containing | containing | Containing |
| | (g/L) | UV-Vis | (%) | (Normalized) | (Normalized) | HMW (%) | antibody (%) | LMW (%) |
| IgG 2 | | | | | | (2.8) | (99.6) | (0.0) |
| Method (b) | 3.17 | 1.20 | 22.7 | 1.00 | 1.00 | 1.79 | 97.99 | 0.22 |
| Method (a) | | 4.71 | 74.0 | 3.65 | 3.23 | 3.17 | 96.57 | 0.14 |
| IgG 1 | | | | | | (2.7) | (97.3) | (0.0) |
| Method (b) | 0.87 | 0.39 | 26.9 | 1.00 | 1.00 | 1.55 | 98.45 | 0.00 |
| Method (a) | | 1.32 | 75.6 | 3.50 | 2.30 | 2.54 | 97.25 | 0.21 |
| IgG 4 | | | | | | (0.8) | (99.2) | (0.0) |
| Method (b) | 0.70 | 0.39 | 33.4 | 1.00 | 1.00 | 0.47 | 99.53 | 0.00 |
| Method (a) | | 1.39 | 98.9 | 2.33 | 3.63 | 1.07 | 98.82 | 0.11 |

### Example 18

### Purification of Multiple AAV Serotypes Using a Purification Matrix

[0345] Recombinant AAV particles, including AAV1, AAV2, AAV6, AAV8, and AAV9 particles, packaging a tdTomato transgene, were produced in a producer cell line (e.g., HEK293) according to standard protocols. The cells were lysed, and centrifuged to remove cellular debris. The cellular supernatant was contacted with a purification matrix having an amino acid sequence of SEQ ID NO: 172 for a period of time to allow complex formation. An environmental factor (e.g. 0.5 M-2M NaCl, MgCl₂, or CaCl₂) was then applied to increase the size of the complexes. The purification matrix, environmental factor, and cellular supernatant were incubated at room temperature for 15 minutes. Subsequently, the purification matrix, environmental factor, and cellular supernatant were concentrated (5-50 fold) using a 13 cm² hollow filter (0.2 μm pore size). Six wash diavolumes were performed using phosphate buffer solution and sodium chloride. This protocol allowed for separation of the purification matrix, with AAVs bound from impurities on the basis of size. The AAVs were eluted from the purification matrix by applying a buffer (e.g., the second environmental factor). The purification matrix was collected from the retentate. Various buffers were evaluated as shown in Table 5. The AAVs are then titered and frozen at −80° C. for future use.

TABLE 5
Buffers employed as the “second environmental factor”

| | Composition of Second |
|---|---|
| Environmental Factor | Environmental Factor |
| A | 0.5 M Arginine (pH = 2); 0.6 M NaCl |
| B | 0.1 M Glycine (pH = 2); 0.6 M NaCl |
| C | 0.1 M Glycine (pH = 2); 0.6 M MgCl₂ |
| D | 0.1 M Glycine (pH = 2); 0.6 M CaCl₂ |

[0346] Quantitative real-time polymerase chain reaction (qPCR) was utilized to evaluate the amount of AAV captured from solution and the amount of AAV obtained after elution. The purification matrix captured greater than 99% of AAV particles of multiple serotypes (AAV1, AAV2, AAV6, AAV8, and AAV9) (FIG. 23). Each buffer evaluated eluted over 65% of bound AAV particles in a single diavolume (FIG. 24).

[0347] The purification matrix was recycled after elution of the AAV particles to determine whether or not it could be utilized for future purifications. Recycling was performed by incubating the purification matrix at 95° C. for 5 minutes or soaking the purification matrix in 1 M NaOH or 6 M guanidine hydrochloride for five minutes.

[0348] As Table 6 shows, the purification matrix can be regenerated and utilized for repeated capture. After five cycles of purification/regeneration, the purification matrix captures 98% of AAV.

TABLE 6
Recycling of Purification Matrix

| # of times purification | Captured viral genome (vg)/ | |
|---|---|---|
| matrix has been used | milliliter (mL) | % Capture |
| 1 | 8.46 × 10¹⁰ | 97 |
| 2 | 8.60 × 10¹⁰ | 98 |
| 3 | 8.61 × 10¹⁰ | 99 |
| 4 | 8.57 × 10¹⁰ | 98 |
| 5 | 8.53 × 10¹⁰ | 98 |

[0349] Sodium dodecycl sulfate-polyacrylamide gel electrophoresis (SDS-PAGE) was utilized to evaluate the purity of the eluted AAV samples. The gels were then silver stained, to visualize any contaminants in the sample. As shown in FIG. 25, the major AAV structural proteins Vp1, Vp2, and Vp3 were visible on the gel, but no other major bands were observed. A Western Blot confirmed the presence of capsid proteins in the sample that had been eluted from the purification matrix (FIG. 26). Furthermore, after the AAV particles were captured by the purification matrix, no AAV particles remained in the capture supernatant (Capture Sup of FIG. 26). Taken together, this data indicates that, after elution from the purification matrix, substantially all contaminants have been removed from the sample, and the isolated AAV has a high degree of purity.

[0350] In a subsequent experiment, it was evaluated whether the purification matrix is able to capture full capsids, empty capsids, or both. Total number of AAV capsids present in samples eluted from the purification matrix was estimated using an ELISA-based assay. The eluted samples were also evaluated using qPCR, to determine the number of viral genomes. A qPCR:ELISA value was used to approximate the ratio of full capsids relative to total capsids. As shown in Table 7, the purification matrix enriched for full capsids.

TABLE 7
Enrichment for Full AAV Capsid

| | | | Elution | Change in |
|---|---|---|---|---|
| Method | Starting Quantity | Capture % | Quantity | Full % |
| qPCR | 5.78 × 10¹⁰ | 99.2 | 5.73 × 10¹⁰ | 33% → 70% |
| ELISA | 1.76 × 10¹¹ | 99.9 | 8.14 × 10¹⁰ | |

[0351] The eluted AAV samples were also assayed to determine whether they maintained infectivity after purification. AAV8 carrying a tdTomato transgene was administered to HEK293 cells (10,000 cells/well) in culture at a multiplicity of infection (MOI) 1×10⁶ or 1×10⁷. After 48 of incubation, the cells were visualized for tdTomato fluorescence using fluorescence microscopy. As shown in FIG. 27A, AAV purified by the purification matrix (ViraTag™) infected cells to a similar extent as AAVs purified according to standard protocols (Pos Ctrl). This data was quantified, as shown in FIG. 27B. There was no statistically significant difference between infectivity levels of the AAV8 purified by standard protocols (Pos Ctrl) and the AAV8 purified by the purification matrix (ViraTag™). Accordingly, this data shows that AAV particles purified using the tested purification matrix (ViraTag™) retain high levels of infectivity.

### Numbered Embodiments

[0352] Notwithstanding the appended claims, the disclosure sets forth the following numbered embodiments:

Method of Purifying a Biologic from a Contaminant
[0353] 1. A method of purifying a biologic comprising contacting the biologic with a protein-based purification matrix;
[0354] wherein the biologic binds to the purification matrix to form a complex;
[0355] wherein the size of the complex is increased by a first environmental factor;
[0356] wherein the complex is separated from at least one contaminant on the basis of size; and
[0357] wherein the biologic is separated from the purification matrix by a second environmental factor.
[0358] 2. The method of embodiment 1, wherein the purification matrix comprises (i) a capture domain which binds to the biologic, and (ii) a polypeptide with phase behavior, wherein the capture domain is coupled to the polypeptide with phase behavior.
[0359] 3. The method of embodiment 2, wherein the capture domain is coupled to the polypeptide with phase behavior via a linker.
[0360] 4. The method of embodiment 3, wherein the linker is a peptide linker.
[0361] 5. The method of embodiment 4, wherein the peptide linker comprises a protease cleavage site.
[0362] 6. The method of embodiment 3, wherein the linker is a chemical linker.
[0363] 7. The method of embodiment 1, wherein the purification matrix comprises a fusion protein comprising (i) a capture domain which binds to the biologic and (ii) a polypeptide with phase behavior.
[0364] 8. The method of any one of embodiments 2-7, wherein the polypeptide with phase behavior is a resilin-like polypeptide.
[0365] 9. The method of any one of embodiments 2-7, wherein the polypeptide with phase behavior is an elastin-like polypeptide.
[0366] 10. The method of any one of 2-7 or 9, wherein the polypeptide with phase behavior is a polymer containing a pentapeptide repeat having the sequence (Val-Pro-Gly-Xaa-Gly)ₙ (SEQ ID NO: 10), or a randomized, scrambled analog thereof; wherein Xaa can be any amino acid except proline.
[0367] 11. The method of embodiment 10, wherein n is an integer from 1 to 360, inclusive of endpoints.
[0368] 12. The method of any one of embodiments 2-7 or 9, wherein the polypeptide with phase behavior comprises an amino acid sequence selected from:

a.
(SEQ ID NO: 1)
(GRGDSPY)ₙ
b.
(SEQ ID NO: 2)
(GRGDSPH)ₙ
c.
(SEQ ID NO: 3)
(GRGDSPV)ₙ
d.
(SEQ ID NO: 4)
(GRGDSPYG)ₙ
e.
(SEQ ID NO: 5)
(RPLGYDS)ₙ
f.
(SEQ ID NO: 6)
(RPAGYDS)ₙ
g.
(SEQ ID NO: 7)
(GRGDSYP)ₙ
h.
(SEQ ID NO: 8)
(GRGDSPYQ)ₙ
i.
(SEQ ID NO: 9)
(GRGNSPYG)ₙ
j.
(SEQ ID NO: 11)
(GVGVP)ₙ;
k.
(SEQ ID NO: 12)
(GVGVPGLGVPGVGVPGLGVPGVGVP)ₘ;
l.
(SEQ ID NO: 13)
(GVGVPGVGVPGAGVPGVGVPGVGVP)ₘ;
m.
(SEQ ID NO: 14)
(GVGVPGWGVPGVGVPGWGVPGVGVP)ₘ;
n.
(SEQ ID NO: 15)
(GVGVPGVGVPGVGVPGVGVPGVGVPGVGVPGEGVPGFGVPGVGVP)ₘ;
o.
(SEQ ID NO: 16)
(GVGVPGVGVPGVGVPGVGVPGVGVPGVGVPGKGVPGFGVPGVGVP)ₘ;
and
p.
(SEQ ID NO: 17)
(GAGVPGVGVPGAGVPGVGVPGAGVP)ₘ;

or a randomized, scrambled analog thereof;
[0369] wherein:
[0370] n is an integer in the range of 20-360, inclusive of endpoints; and
[0371] m is an integer in the range of 4-25, inclusive of endpoints.
[0372] 13. The method of any one of embodiments 2-7 or 9, wherein the polypeptide with phase behavior comprises an amino acid sequence selected from:

(a)
(SEQ ID NO: 52)
(GVGVP)ₘ;
(b)
(SEQ ID NO: 57)
(ZZPXXXXGZ)ₘ;
(c)
(SEQ ID NO: 58)
(ZZPXGZ)ₘ;
(d)
(SEQ ID NO: 59)
(ZZPXXGZ)ₘ; or
(e)
(SEQ ID NO: 60)
(ZZPXXXGZ)ₘ,

[0373] wherein m is an integer between 10 and 160, inclusive of endpoints, wherein X if present is any amino acid except proline or glycine, and wherein Z if present is any amino acid.
[0374] 14. The method of any one of embodiments 2-7 or 9, wherein the polypeptide with phase behavior comprises an amino acid sequence selected from:

(a)
(SEQ ID NO: 53)
(GVGVPGVGVPGAGVPGVGVPGVGVP)ₘ; or
(b)
(SEQ ID NO: 55)
(GVGVPGVGVPGLGVPGVGVPGVGVP)ₘ;

wherein m is an integer between 2 and 32, inclusive of endpoints.
[0375] 15. The method of any one of embodiments 2-7 or 9, wherein the polypeptide with phase behavior comprises an amino acid sequence selected from:

[0376] (a) (GVGVPGVGVPGAGVPGVGVPGVGVP)ₘ (SEQ ID NO: 53), wherein m is 8 or 16;

[0377] (b) (GVGVPGAGVP)ₘ (SEQ ID NO: 54), wherein m is an integer between 5 and 80, inclusive of endpoints; or

[0378] (c) (GXGVP)ₘ (SEQ ID NO: 56), wherein m is an integer between 10 and 160, inclusive of endpoints, and wherein X for each repeat is independently selected from the group consisting of glycine, alanine, valine, isoleucine, leucine, phenylalanine, tyrosine, tryptophan, lysine, arginine, aspartic acid, glutamic acid, and serine.
[0379] 16. The method of any one of embodiments 2-15, wherein the capture domain comprises the sequence of any one of SEQ ID NO: 24-49, 62-148, 167-171 or a sequence having at least 1, at least 2, at least 3, at least 4, or at least 5 mutations relative thereto.
[0380] 17. The method of any one of embodiments 2-15, wherein the binding of the biologic to the purification matrix is reversible.
[0381] 18. The method of any one of embodiments 2-15, wherein the binding of the biologic to the purification matrix is non-covalent.
[0382] 19. The method of any one of embodiments 2-15, wherein the binding of the biologic to the purification matrix is covalent.
[0383] 20. The method of any one of embodiments 1-19, wherein the biologic is a lipid, a lipopolysaccharide, a cell, a protein, a nucleic acid, a carbohydrate, or a viral particle.
[0384] 21. The method of embodiment 20, wherein the biologic is a cell.
[0385] 22. The method of embodiment 21, wherein the cell is a bacterial cell, a yeast cell, or a mammalian cell.
[0386] 23. The method of embodiment 21 or 22, wherein the cell is a stem cell, a bone cell, a blood cell, a muscle cell, a fat cell, a skin cell, a nerve cell, an endothelial cell, a sex cell, a pancreatic cell, or a cancer cell.
[0387] 24. The method of embodiment 21 or 22, wherein the cell is an immune cell.
[0388] 25. The method of embodiment 24, wherein the immune cell is a T cell, a B cell, a NK cell, a peripheral blood mononuclear cell, or a neutrophil.
[0389] 26. The method of embodiment 25, wherein the cell is a T cell expressing a chimeric antigen receptor (CAR).
[0390] 27. The method of embodiment 20, wherein the nucleic acid is a DNA or an RNA.
[0391] 28. The method of embodiment 17, wherein the viral particle is an adenovirus particle, an adeno-associated virus (AAV) particle, a lentivirus particle, a retrovirus particle, a poxvirus particle, a measles virus particle, or a herpesvirus particle.
[0392] 29. The method of any one of embodiments 1-28, wherein the biologic has a diameter between 1 nm and 100 μm, inclusive of the endpoints.
[0393] 30. The method of embodiment 29, wherein the biologic has a diameter between 1 nm and 100 nm, inclusive of the endpoints.
[0394] 31. The method of embodiment 29, wherein the biologic has a diameter between 100 nm and 1 μm, inclusive of the endpoints.
[0395] 32. The method of embodiment 29, wherein the biologic has a diameter between 1 μm and 50 μm, inclusive of the endpoints.
[0396] 33. The method of embodiment 29, wherein the biologic has a diameter between 50 μm and 100 μm, inclusive of the endpoints.
[0397] 34. The method of any one of embodiments 1-33, wherein the method is completed in about 0.5 to about 24 hours.
[0398] 35. The method of embodiment 34, wherein the method is completed in about 0.5 to about 8 hours.
[0399] 36. The method of embodiment 34, wherein the method is completed in about 2 to about 6 hours.
[0400] 37. The method of any one of embodiments 1-36, wherein the separation of the complex from the at least one contaminant can be observed visually with an unaided eye.
[0401] 38. The method of any one of embodiments 1-37, wherein the increase in the size of the complex is at least a 2-fold increase.
[0402] 39. The method of embodiment 38, wherein the increase in the size of the complex is at least a 10-fold increase.
[0403] 40. The method of embodiment 38, wherein the increase in the size of the complex is at least a 25-fold increase.
[0404] 41. The method of any one of embodiments 38-40, wherein the increase in size is an increase in the mass of the complex.
[0405] 42. The method of any one of embodiments 38-40, wherein the increase in size is an increase in the diameter of the complex.
[0406] 43. The method of any one of embodiments 1-42, wherein the first environmental factor comprises one or more of:

[0407] a. a change in one or more of temperature, pH, salt concentration, concentration of the purification matrix, concentration of the biologic, or pressure;

[0408] b. the addition of one or more surfactants, cofactor, vitamin, molecular crowding agents, reducing agents, oxidizing agents, enzymes, or denaturing agents; or

[0409] c. the application of electromagnetic or acoustic waves.
[0410] 44. The method of any one of embodiments 1-42, wherein the second environmental factor comprises one or more of:

[0411] a. a change in one or more of temperature, pH, salt concentration, concentration of the purification matrix, concentration of the biologic, or pressure;

[0412] b. the addition of one or more surfactants, molecular crowding agents, reducing agents, enzymes, denaturing agents, cofactor, vitamin, or oxidizing agents; or

[0413] c. the application of electromagnetic or acoustic waves.
[0414] 45. The method of any one of embodiments 1-44, wherein the separation on the basis of size is performed using tangential flow filtration, membrane chromatography, analytical ultracentrifugation, high performance liquid chromatography, membrane chromatography, normal flow filtration, acoustic wave separation, centrifugation, counterflow centrifugation, and fast protein liquid chromatography.
[0415] 46. The method of any one of embodiments 1-45, wherein the at least one contaminant is selected from a solvent, an endotoxin, a protein, a peptide, a nucleic acid, and a carbohydrate.
[0416] 47. The method of any one of embodiments 1-46, wherein the purification yield of the biologic is at least 70%, at least 80%, at least 90%, at least 95%, at least 96%, at least 97%, at least 98%, or at least 99%.
[0417] 48. The method of any one of embodiments 1-47, wherein the biologic is purified to at least 70%, at least 80%, at least 90%, at least 95%, at least 96%, at least 97%, at least 98%, or at least 99% purity.
   Method of Removing a Contaminant from a Composition Comprising a Biologic
[0418] 1a. A method of removing a contaminant from a composition comprising a biologic, the method comprising contacting the contaminant with a protein-based purification matrix;
[0419] wherein the contaminant binds to the matrix to form a complex;
[0420] wherein the size of the complex is increased by a first environmental factor;
[0421] wherein the complex is separated from the biologic on the basis of size; and
[0422] wherein the contaminant is separated from the matrix by a second environmental factor.
[0423] 2a. The method of embodiment 1a, wherein the purification matrix comprises (i) a capture domain which binds to the contaminant, and (ii) a polypeptide with phase behavior, wherein the capture domain is coupled to the polypeptide with phase behavior.
[0424] 3a. The method of embodiment 2a, wherein the capture domain is coupled to the polypeptide with phase behavior via a linker.
[0425] 4a. The method of embodiment 3a, wherein the linker is a peptide linker.
[0426] 5a. The method of embodiment 4a, wherein the peptide linker comprises a protease cleavage site.
[0427] 6a. The method of embodiment 3a, wherein the linker is a chemical linker.
[0428] 7a. The method of embodiment 1a, wherein the purification matrix comprises a fusion protein comprising (i) a capture domain which binds to the contaminant and (ii) a polypeptide with phase behavior.
[0429] 8a. The method of any one of embodiments 2a-7a, wherein the polypeptide with phase behavior is a resilin-like polypeptide.
[0430] 9a. The method of any one of embodiments 2a-7a, wherein the polypeptide with phase behavior is an elastin-like polypeptide.
[0431] 10a. The method of any one of 2a-7a or 9a, wherein the polypeptide with phase behavior is a polymer containing a pentapeptide repeat having the sequence (Val-Pro-Gly-Xaa-Gly)ₙ (SEQ ID NO: 10), or a randomized, scrambled analog thereof; wherein Xaa can be any amino acid except proline.
[0432] 11a. The method of embodiment 10a, wherein n is an integer from 1 to 360, inclusive of endpoints.
[0433] 12a. The method of any one of embodiments 2a-7a or 9a, wherein the polypeptide with phase behavior comprises an amino acid sequence selected from:

a.
(SEQ ID NO: 52)
(GVGVP)ₘ;
b.
(SEQ ID NO: 57)
(ZZPXXXXGZ)ₘ;
c.
(SEQ ID NO: 58)
(ZZPXGZ)ₘ;
d.
(SEQ ID NO: 59)
(ZZPXXGZ)ₘ;
or
e.
(SEQ ID NO: 60)
(ZZPXXXGZ)ₘ,

or a randomized, scrambled analog thereof;
[0434] wherein:
[0435] n is an integer in the range of 20-360, inclusive of endpoints; and
[0436] m is an integer in the range of 4-25, inclusive of endpoints.
[0437] 13a. The method of any one of embodiments 2a-7a or 9a, wherein the polypeptide with phase behavior comprises an amino acid sequence selected from:

a.
(SEQ ID NO: 52)
(GVGVP)ₘ;
b.
(SEQ ID NO: 57)
(ZZPXXXXGZ)ₘ;
c.
(SEQ ID NO: 58)
(ZZPXGZ)ₘ;
d.
(SEQ ID NO: 59)
(ZZPXXGZ)ₘ;
or
e.
(SEQ ID NO: 60)
(ZZPXXXGZ)ₘ,

wherein m is an integer between 10 and 160, inclusive of endpoints, wherein X if present is any amino acid except proline or glycine, and wherein Z if present is any amino acid.
[0438] 14a. The method of any one of embodiments 2a-7a or 9a, wherein the polypeptide with phase behavior comprises an amino acid sequence selected from:

(a)
(SEQ ID NO: 53)
(GVGVPGVGVPGAGVPGVGVPGVGVP)ₘ; or
(b)
(SEQ ID NO: 55)
(GVGVPGVGVPGLGVPGVGVPGVGVP)ₘ;

wherein m is an integer between 2 and 32, inclusive of endpoints.
[0439] 15a. The method of any one of embodiments 2a-7a or 9a, wherein the polypeptide with phase behavior comprises an amino acid sequence selected from:

[0440] (a) (GVGVPGVGVPGAGVPGVGVPGVGVP)ₘ (SEQ ID NO: 53), wherein m is 8 or 16;

[0441] (b) (GVGVPGAGVP)ₘ (SEQ ID NO: 54), wherein m is an integer between 5 and 80, inclusive of endpoints; or

[0442] (c) (GXGVP)ₘ (SEQ ID NO: 56), wherein m is an integer between 10 and 160, inclusive of endpoints, and wherein X for each repeat is independently selected from the group consisting of glycine, alanine, valine, isoleucine, leucine, phenylalanine, tyrosine, tryptophan, lysine, arginine, aspartic acid, glutamic acid, and serine.
[0443] 16a. The method of any one of embodiments 2a-15a, wherein the capture domain comprises the sequence of any one of SEQ ID NO: 24-49, 62-148, or 167-171 or a sequence having at least 1, at least 2, at least 3, at least 4, or at least 5 mutations relative thereto.
[0444] 17a. The method of any one of embodiments 1a-16a, wherein the binding of the contaminant to the purification matrix is reversible.
[0445] 18a. The method of any one of embodiments 1a-16a, wherein the binding of the contaminant to the purification matrix is non-covalent.
[0446] 19a. The method of any one of embodiments 1a-16a, wherein the binding of the contaminant to the purification matrix is covalent.
[0447] 20a. The method of any one of embodiments 1a-19a, wherein the biologic is a lipid, lipopolysaccharide, cell, a protein, a nucleic acid, a carbohydrate, or a viral particle.
[0448] 21a. The method of embodiment 20a, wherein the biologic is a cell.
[0449] 22a. The method of embodiment 32a, wherein the cell is a bacterial cell, a yeast cell, or a mammalian cell.
[0450] 23a. The method of embodiment 21a or 22a, wherein the cell is a stem cell, a bone cell, a blood cell, a muscle cell, a fat cell, a skin cell, a nerve cell, an endothelial cell, a sex cell, a pancreatic cell, or a cancer cell.
[0451] 24a. The method of embodiments 21a or 22a, wherein the cell is an immune cell.
[0452] 25a. The method of embodiment 24a, wherein the immune cell is a T cell, a B cell, a NK cell, a peripheral blood mononuclear cell, or a neutrophil.
[0453] 26a. The method of embodiment 25a, wherein the cell is a T cell expressing a chimeric antigen receptor (CAR).
[0454] 27a. The method of embodiment 20a, wherein the nucleic acid is a DNA or an RNA.
[0455] 28a. The method of embodiment 20a, wherein the viral particle is an adenovirus particle, an adeno-associated virus (AAV) particle, a lentivirus particle, a retrovirus particle, a poxvirus particle, a measles virus particle, or a herpesvirus particle.
[0456] 29a. The method of any one of embodiments 1a-28a, wherein the biologic has a diameter between 1 nm and 100 μm, inclusive of the endpoints.
[0457] 30a. The method of embodiment 29a, wherein the biologic has a diameter between 1 nm and 100 nm, inclusive of the endpoints.
[0458] 31a. The method of embodiment 29a, wherein the biologic has a diameter between 100 nm and 1 μm, inclusive of the endpoints.
[0459] 32a. The method of embodiment 29a, wherein the biologic has a diameter between 1 μm and 50 μm, inclusive of the endpoints.
[0460] 33a. The method of embodiment 29a, wherein the biologic has a diameter between 50 μm and 100 μm, inclusive of the endpoints.
[0461] 34a. The method of any one of embodiments 1a-33a, wherein the method is completed in about 0.5 to about 24 hours.
[0462] 35a. The method of embodiment 34a, wherein the method is completed in about 0.5 to about 8 hours.
[0463] 36a. The method of embodiment 34a, wherein the method is completed in about 2 to about 6 hours.
[0464] 37a. The method of any one of embodiments 1a-36a, wherein the separation of the complex from the composition comprising a biologic can be observed visually with an unaided eye.
[0465] 38a. The method of any one of embodiments 1a-37a, wherein the increase in the size of the complex is at least a 2-fold increase.
[0466] 39a. The method of embodiment 80a, wherein the increase in the size of the complex is at least a 10-fold increase.
[0467] 40a. The method of embodiment 39a, wherein the increase in the size of the complex is at least a 25-fold increase.
[0468] 41a. The method of any one of embodiments 38a-40a, wherein the increase in size is an increase in the mass of the complex.
[0469] 42a. The method of any one of embodiments 38a-40a, wherein the increase in size is an increase in the diameter of the complex.
[0470] 43a. The method of any one of embodiments 1a-42a, wherein the first environmental factor comprises one or more of:
[0471] a. a change in one or more of temperature, pH, salt concentration, concentration of the purification matrix, concentration of the biologic, or pressure;
[0472] b. the addition of one or more surfactants, molecular crowding agents, reducing agents, oxidizing agents, enzymes, cofactor, vitamin, or denaturing agents; or
[0473] c. the application of electromagnetic or acoustic waves.
[0474] 44a. The method of any one of embodiments 1a-42a, wherein the second environmental factor comprises one or more of:
[0475] a. a change in one or more of temperature, pH, salt concentration, concentration of the purification matrix, concentration of the biologic, or pressure;
[0476] b. the addition of one or more surfactants, molecular crowding agents, reducing agents, oxidizing agents, enzymes, cofactor, vitamin, or denaturing agents; or
[0477] c. the application of electromagnetic or acoustic waves.
[0478] 45a. The method of any one of embodiments 1a-44a, wherein the separation on the basis of size is performed using tangential flow filtration, analytical ultracentrifugation, membrane chromatography, high performance liquid chromatography, normal flow filtration, acoustic wave separation, centrifugation, counterflow centrifugation, and fast protein liquid chromatography.
[0479] 46a. The method of any one of embodiments 1a-45a, wherein the contaminant is selected from a solvent, an endotoxin, a protein, a peptide, a nucleic acid, and a carbohydrate.
[0480] 47a. The method of any one of embodiments 1a-46a, wherein at least 70%, at least 80%, at least 90%, at least 95%, at least 96%, at least 97%, at least 98%, or at least 99% of the contaminant is removed.
   Method of Purifying a Biologic from a Contaminant
[0481] 1b. A method of purifying a biologic, the method comprising contacting the biologic with a protein-based purification matrix;
[0482] wherein the biologic binds to the matrix to form a complex;
[0483] wherein the size of the complex is increased;
[0484] wherein the complex is separated from at least one contaminant on the basis of size; and
[0485] wherein the biologic is separated from the matrix by an environmental factor.
[0486] 2b. The method of embodiment 1b, wherein the purification matrix comprises (i) a capture domain which binds to the biologic, and (ii) a polypeptide with phase behavior, wherein the capture domain is coupled to the polypeptide with phase behavior.
[0487] 3b. The method of embodiment 2b, wherein the capture domain is coupled to the polypeptide with phase behavior via a linker.
[0488] 4b. The method of embodiment 3b, wherein the linker is a peptide linker.
[0489] 5b. The method of embodiment 4b, wherein the peptide linker comprises a protease cleavage site.
[0490] 6b. The method of embodiment 3b, wherein the linker is a chemical linker.
[0491] 7b. The method of embodiment 1b, wherein the purification matrix comprises a fusion protein comprising (i) a capture domain which binds to the biologic and (ii) a polypeptide with phase behavior.
[0492] 8b. The method of any one of embodiments 2b-7b, wherein the polypeptide with phase behavior is a resilin-like polypeptide.
[0493] 9b. The method of any one of embodiments 2b-7b, wherein the polypeptide with phase behavior is an elastin-like polypeptide.
[0494] 10b. The method of any one of 2b-7b or 9b, wherein the polypeptide with phase behavior is a polymer containing a pentapeptide repeat having the sequence (Val-Pro-Gly-Xaa-Gly)ₙ (SEQ ID NO: 10), or a randomized, scrambled analog thereof; wherein Xaa can be any amino acid except proline.
[0495] 11b. The method of embodiment 10b, wherein n is an integer from 1 to 360, inclusive of endpoints.
[0496] 12b. The method of any one of embodiments 2b-7b or 9b, wherein the polypeptide with phase behavior comprises an amino acid sequence selected from:

a.
(SEQ ID NO: 1)
(GRGDSPY)ₙ
b.
(SEQ ID NO: 2)
(GRGDSPH)ₙ
c.
(SEQ ID NO: 3)
(GRGDSPV)ₙ
d.
(SEQ ID NO: 4)
(GRGDSPYG)ₙ
e.
(SEQ ID NO: 5)
(RPLGYDS)ₙ
f.
(SEQ ID NO: 6)
(RPAGYDS)ₙ
g.
(SEQ ID NO: 7)
(GRGDSYP)ₙ
h.
(SEQ ID NO: 8)
(GRGDSPYQ)ₙ
i.
(SEQ ID NO: 9)
(GRGNSPYG)ₙ
j.
(SEQ ID NO: 11)
(GVGVP)ₙ;
k.
(SEQ ID NO: 12)
(GVGVPGLGVPGVGVPGLGVPGVGVP)ₘ;
l.
(SEQ ID NO: 13)
(GVGVPGVGVPGAGVPGVGVPGVGVP)ₘ;
m.
(SEQ ID NO: 14)
(GVGVPGWGVPGVGVPGWGVPGVGVP)ₘ;
n.
(SEQ ID NO: 15)
(GVGVPGVGVPGVGVPGVGVPGVGVP
GVGVPGEGVPGFGVPGVGVP)ₘ;
o.
(SEQ ID NO: 16)
(GVGVPGVGVPGVGVPGVGVPGVGVP
GVGVPGKGVPGFGVPGVGVP)ₘ;
and
p.
(SEQ ID NO: 17)
(GAGVPGVGVPGAGVPGVGVPGAGVP)ₘ;

or a randomized, scrambled analog thereof;
[0497] wherein:
[0498] n is an integer in the range of 20-360, inclusive of endpoints; and
[0499] m is an integer in the range of 4-25, inclusive of endpoints.
[0500] 13b. The method of any one of embodiments 2b-7b or 9b, wherein the polypeptide with phase behavior comprises an amino acid sequence selected from:

a.
(SEQ ID NO: 52)
(GVGVP)ₘ;
b.
(SEQ ID NO: 57)
(ZZPXXXXGZ)ₘ;
c.
(SEQ ID NO: 58)
(ZZPXGZ)ₘ;
d.
(SEQ ID NO: 59)
(ZZPXXGZ)ₘ;
or
e.
(SEQ ID NO: 60)
(ZZPXXXGZ)ₘ,

wherein m is an integer between 10 and 160, inclusive of endpoints, wherein X if present is any amino acid except proline or glycine, and wherein Z if present is any amino acid.
[0501] 14b. The method of any one of embodiments 2b-7b or 9b, wherein the polypeptide with phase behavior comprises an amino acid sequence selected from:

(a)
(SEQ ID NO: 53)
(GVGVPGVGVPGAGVPGVGVPGVGVP)ₘ; or
(b)
(SEQ ID NO: 55)
(GVGVPGVGVPGLGVPGVGVPGVGVP)ₘ;

wherein m is an integer between 2 and 32, inclusive of endpoints.
[0502] 15b. The method of any one of embodiments 2b-7b or 9b, wherein the polypeptide with phase behavior comprises an amino acid sequence selected from:

[0503] (a) (GVGVPGVGVPGAGVPGVGVPGVGVP)ₘ (SEQ ID NO: 53), wherein m is 8 or 16;

[0504] (b) (GVGVPGAGVP)ₘ (SEQ ID NO: 54), wherein m is an integer between 5 and 80, inclusive of endpoints; or

[0505] (c) (GXGVP)ₘ (SEQ ID NO: 56), wherein m is an integer between 10 and 160, inclusive of endpoints, and wherein X for each repeat is independently selected from the group consisting of glycine, alanine, valine, isoleucine, leucine, phenylalanine, tyrosine, tryptophan, lysine, arginine, aspartic acid, glutamic acid, and serine.
[0506] 16b. The method of any one of embodiments 2b-15b, wherein the capture domain comprises the sequence of any one of SEQ ID NO: 24-49, 62-148, or 167-171 or a sequence having at least 1, at least 2, at least 3, at least 4, or at least 5 mutations relative thereto.
[0507] 17b. The method of any one of embodiments 1b-16b, wherein the binding of the biologic to the purification matrix is reversible.
[0508] 18b. The method of any one of embodiments 1b-16b, wherein the binding of the biologic to the purification matrix is non-covalent.
[0509] 19b. The method of any one of embodiments 1b-16b, wherein the binding of the biologic to the purification matrix is covalent.
[0510] 20b. The method of any one of embodiments 1b-19b, wherein the biologic is a lipid, lipopolysaccharide, cell, a protein, a nucleic acid, a carbohydrate, or a viral particle.
[0511] 21b. The method of embodiment 20b, wherein the biologic is a cell.
[0512] 22b. The method of embodiment 21b, wherein the cell is a bacterial cell, a yeast cell, or a mammalian cell.
[0513] 23b. The method of embodiment 21b or 22b, wherein the cell is a stem cell, a bone cell, a blood cell, a muscle cell, a fat cell, a skin cell, a nerve cell, an endothelial cell, a sex cell, a pancreatic cell, or a cancer cell.
[0514] 24b. The method of any one of embodiments 21b or 22b, wherein the cell is an immune cell.
[0515] 25b. The method of embodiment 24b, wherein the immune cell is a T cell, a B cell, a NK cell, a peripheral blood mononuclear cell, or a neutrophil.
[0516] 26b. The method of embodiment 25b, wherein the cell is a T cell expressing a chimeric antigen receptor (CAR).
[0517] 27b. The method of embodiment 20b, wherein the nucleic acid is a DNA or an RNA.
[0518] 28b. The method of embodiment 20b, wherein the virus is an adenovirus particle, an adeno-associated virus (AAV) particle, a lentivirus particle, a retrovirus particle, a poxvirus particle, a measles virus particle, or a herpesvirus particle.
[0519] 29b. The method of any one of embodiments 1b-28b, wherein the biologic has a diameter between 1 nm and 100 μm, inclusive of the endpoints.
[0520] 30b. The method of embodiment 29b, wherein the biologic has a diameter between 1 nm and 100 nm, inclusive of the endpoints.
[0521] 31b. The method of embodiment 29b, wherein the biologic has a diameter between 100 nm and 1 μm, inclusive of the endpoints.
[0522] 32b. The method of embodiment 29b, wherein the biologic has a diameter between 1 μm and 50 μm, inclusive of the endpoints.
[0523] 33b. The method of embodiment 29b, wherein the biologic has a diameter between 50 μm and 100 μm, inclusive of the endpoints.
[0524] 34b. The method of any one of embodiments 1b-33b, wherein the method is completed in about 0.5 to about 24 hours.
[0525] 35b. The method of embodiment 34b, wherein the method is completed in about 0.5 to about 8 hours.
[0526] 36b. The method of embodiment 34b, wherein the method is completed in about 2 to about 6 hours.
[0527] 37b. The method of any one of embodiments 1b-36b, wherein the separation of the complex from the at least one contaminant can be observed visually with an unaided eye.
[0528] 38b. The method of any one of embodiments 1b-37b, wherein the increase in the size of the complex is at least a 2-fold increase.
[0529] 39b. The method of embodiment 38b, wherein the increase in the size of the complex is at least a 10-fold increase.
[0530] 40b. The method of embodiment 39b, wherein the increase in the size of the complex is at least a 25-fold increase.
[0531] 41b. The method of any one of embodiments 38b-40b, wherein the increase in size is an increase in the mass of the complex.
[0532] 42b. The method of any one of embodiments 38b-40b, wherein the increase in size is an increase in the diameter of the complex.
[0533] 43b. The method of any one of embodiments 1b-42b, wherein the environmental factor comprises one or more of:
[0534] a. a change in one or more of temperature, pH, salt concentration, concentration of the purification matrix, concentration of the biologic, or pressure;
[0535] b. the addition of one or more surfactants, molecular crowding agents, reducing agents, oxidizing agents, enzymes, cofactor, vitamin, or denaturing agents; or
[0536] c. the application of electromagnetic or acoustic waves.
[0537] 44b. The method of any one of embodiments 1b-43b, wherein the separation on the basis of size is performed using tangential flow filtration, analytical ultracentrifugation, membrane chromatography, high performance liquid chromatography, normal flow filtration, acoustic wave separation, centrifugation, counterflow centrifugation, and fast protein liquid chromatography.
[0538] 45b. The method of any one of embodiments 1b-44b, wherein the at least one contaminant is selected from a solvent, an endotoxin, a protein, a peptide, a nucleic acid, and a carbohydrate.
[0539] 46b. The method of any one of embodiments 1b-45b, wherein the purification yield of the biologic is at least 70%, at least 80%, at least 90%, at least 95%, at least 96%, at least 97%, at least 98%, or at least 99%.
[0540] 47b. The method of any one of embodiments 1b-46b, wherein the biologic is purified to at least 70%, at least 80%, at least 90%, at least 95%, at least 96%, at least 97%, at least 98%, or at least 99% purity.
   Method of Separating a First Biologic from a Second Biologic
[0541] 1c. A method of separating a first biologic from a second biologic, the method comprising contacting the first biologic with a first protein-based purification matrix and contacting the second biologic with a second protein-based purification matrix; wherein the first biologic binds to the first purification matrix to form a first complex; wherein the second biologic binds to the second purification matrix to form a second complex; and separating the first biologic from the second biologic by applying an environmental factor.
[0542] 2c. The method of embodiment 1c, wherein the first purification matrix comprises (i) a capture domain which binds to the biologic, and (ii) a polypeptide with phase behavior, wherein the capture domain is coupled to the polypeptide with phase behavior.
[0543] 3c. The method of embodiment 1c, wherein the second purification matrix comprises (i) a capture domain which binds to the biologic, and (ii) a polypeptide with phase behavior, wherein the capture domain is coupled to the polypeptide with phase behavior.
[0544] 4c. The method of embodiment 2c or 3c, wherein the capture domain is coupled to the polypeptide with phase behavior via a linker.
[0545] 5c. The method of embodiment 4c, wherein the linker is a peptide linker.
[0546] 6c. The method of embodiment 5c, wherein the peptide linker comprises a protease cleavage site.
[0547] 7c. The method of embodiment 4c, wherein the linker is a chemical linker.
[0548] 8c. The method of embodiment 1c, wherein the first purification matrix comprises a fusion protein comprising (i) a capture domain which binds to the biologic and (ii) a polypeptide with phase behavior.
[0549] 9c. The method of embodiment 2c, wherein the second purification matrix comprises a fusion protein comprising (i) a capture domain which binds to the biologic and (ii) a polypeptide with phase behavior.
[0550] 10c. The method of any one of embodiments 2c-9c, wherein the polypeptide with phase behavior is a resilin-like polypeptide.
[0551] 11c. The method of any one of embodiments 2c-9c, wherein the polypeptide with phase behavior is an elastin-like polypeptide.
[0552] 12c. The method of any one of embodiments 2c-9c or 11c, wherein the polypeptide with phase behavior is a polymer containing a pentapeptide repeat having the sequence (Val-Pro-Gly-Xaa-Gly)ₙ (SEQ ID NO: 10), or a randomized, scrambled analog thereof; wherein Xaa can be any amino acid except proline.
[0553] 13c. The method of embodiment 12c, wherein n is an integer from 1 to 360, inclusive of endpoints.
[0554] 14c. The method of any one of embodiments embodiments 2c-9c or 11c, wherein the polypeptide with phase behavior comprises an amino acid sequence selected from:

a.
(SEQ ID NO: 1)
(GRGDSPY)ₙ
b.
(SEQ ID NO: 2)
(GRGDSPH)ₙ
c.
(SEQ ID NO: 3)
(GRGDSPV)ₙ
d.
(SEQ ID NO: 4)
(GRGDSPYG)ₙ
e.
(SEQ ID NO: 5)
(RPLGYDS)ₙ
f.
(SEQ ID NO: 6)
(RPAGYDS)ₙ
g.
(SEQ ID NO: 7)
(GRGDSYP)ₙ
h.
(SEQ ID NO: 8)
(GRGDSPYQ)ₙ
i.
(SEQ ID NO: 9)
(GRGNSPYG)ₙ
j.
(SEQ ID NO: 11)
(GVGVP)ₙ;
k.
(SEQ ID NO: 12)
(GVGVPGLGVPGVGVPGLGVPGVGVP)ₘ;
l.
(SEQ ID NO: 13)
(GVGVPGVGVPGAGVPGVGVPGVGVP)ₘ;
m.
(SEQ ID NO: 14)
(GVGVPGWGVPGVGVPGWGVPGVGVP)ₘ;
n.
(SEQ ID NO: 15)
(GVGVPGVGVPGVGVPGVGVPGVGVPGVGVPGEGVPGFGVPGVGVP)ₘ;
o.
(SEQ ID NO: 16)
(GVGVPGVGVPGVGVPGVGVPGVGVPGVGVPGKGVPGFGVPGVGVP)ₘ;
and
p.
(SEQ ID NO: 17)
(GAGVPGVGVPGAGVPGVGVPGAGVP)ₘ;

or a randomized, scrambled analog thereof;
[0555] wherein:
[0556] n is an integer in the range of 20-360, inclusive of endpoints; and
[0557] m is an integer in the range of 4-25, inclusive of endpoints.
[0558] 15c. The method of any one of embodiments 2c-9c or 11c, wherein the polypeptide with phase behavior comprises an amino acid sequence selected from:

a.
(SEQ ID NO: 52)
(GVGVP)ₘ;
b.
(SEQ ID NO: 57)
(ZZPXXXXGZ)ₘ;
c.
(SEQ ID NO: 58)
(ZZPXGZ)ₘ;
d.
(SEQ ID NO: 59)
(ZZPXXGZ)ₘ;
or
e.
(SEQ ID NO: 60)
(ZZPXXXGZ)ₘ,

wherein m is an integer between 10 and 160, inclusive of endpoints, wherein X if present is any amino acid except proline or glycine, and wherein Z if present is any amino acid.
[0559] 16c. The method of any one of embodiments 2c-9c or 11c, wherein the polypeptide with phase behavior comprises an amino acid sequence selected from:

(a)
(SEQ ID NO: 53)
(GVGVPGVGVPGAGVPGVGVPGVGVP)ₘ; or
(b)
(SEQ ID NO: 55)
(GVGVPGVGVPGLGVPGVGVPGVGVP)ₘ;

wherein m is an integer between 2 and 32, inclusive of endpoints.
[0560] 17c. The method of any one of embodiments 2c-9c or 11c, wherein the polypeptide with phase behavior comprises an amino acid sequence selected from:

[0561] (a) (GVGVPGVGVPGAGVPGVGVPGVGVP)ₘ (SEQ ID NO: 53), wherein m is 8 or 16;

[0562] (b) (GVGVPGAGVP)ₘ (SEQ ID NO: 54), wherein m is an integer between 5 and 80, inclusive of endpoints; or

[0563] (c) (GXGVP)ₘ (SEQ ID NO: 56), wherein m is an integer between 10 and 160, inclusive of endpoints, and wherein X for each repeat is independently selected from the group consisting of glycine, alanine, valine, isoleucine, leucine, phenylalanine, tyrosine, tryptophan, lysine, arginine, aspartic acid, glutamic acid, and serine.
[0564] 18c. The method of any one of embodiments 2c-17c, wherein the capture domain comprises the sequence of any one of SEQ ID NO: 24-49 and 62-148 and 167-171, or a sequence having at least 1, at least 2, at least 3, at least 4, or at least 5 mutations relative thereto.
[0565] 19c. The method of any one of embodiments 1c-17c, wherein the binding of the first biologic and/or the second biologic to the purification matrix is reversible.
[0566] 20c. The method of any one of embodiments 1c-17c, wherein the binding of the first biologic and/or the second biologic to the purification matrix is non-covalent.
[0567] 21c. The method of any one of embodiments 1c-17c, wherein the binding of the first biologic and/or the second biologic to the purification matrix is covalent.
[0568] 22c. The method of any one of embodiments 1c-21c, wherein the first biologic and/or the second biologic is selected from a cell, a protein, a lipid, a lipopolysaccharide, a nucleic acid, or a viral particle.
[0569] 23c. The method of embodiment 22c, wherein the first biologic and/or the second biologic is a cell.
[0570] 24c. The method of embodiment 23c, wherein the cell is a bacterial cell, a yeast cell, or a mammalian cell.
[0571] 25c. The method of embodiment 23c or 24c, wherein the cell is a stem cell, a bone cell, a blood cell, a muscle cell, a fat cell, a skin cell, a nerve cell, an endothelial cell, a sex cell, a pancreatic cell, or a cancer cell.
[0572] 26c. The method of embodiment 23c or 24c, wherein the cell is an immune cell.
[0573] 27c. The method of embodiment 26c, wherein the immune cell is a T cell, a B cell, a NK cell, a peripheral blood mononuclear cell, or a neutrophil.
[0574] 28c. The method of embodiment 27c, wherein the cell is a T cell expressing a chimeric antigen receptor (CAR).
[0575] 29c. The method of embodiment 22c, wherein the nucleic acid is a DNA or an RNA.
[0576] 30c. The method of embodiment 22c, wherein the viral particle is an adenovirus particle, an adeno-associated virus (AAV) particle, a lentivirus particle, a retrovirus particle, a poxvirus particle, a measles virus particle or a herpesvirus particle.
[0577] 31c. The method of any one of embodiments 1c-30c, wherein the first biologic and/or second biologic has a diameter between 1 nm and 100 μm, inclusive of the endpoints.
[0578] 32c. The method of embodiment 31c, wherein the first biologic and/or second biologic has a diameter between 1 nm and 100 nm, inclusive of the endpoints.
[0579] 33c. The method of embodiment 31c, wherein the first biologic and/or second biologic has a diameter between 100 nm and 1 μm, inclusive of the endpoints.
[0580] 34c. The method of embodiment 31c, wherein the first biologic and/or second biologic has a diameter between 1 μm and 50 μm, inclusive of the endpoints.
[0581] 35c. The method of embodiment 31c, wherein the first biologic and/or second biologic has a diameter between 50 μm and 100 μm, inclusive of the endpoints.
[0582] 36c. The method of any one of embodiments 1c-35c, wherein the method is completed in about 0.5 to about 24 hours.
[0583] 37c. The method of embodiment 36c, wherein the method is completed in about 0.5 to about 8 hours.
[0584] 38c. The method of embodiment 36c, wherein the method is completed in about 2 to about 6 hours.
[0585] 39c. The method of any one of embodiments 1c-38c, wherein the separation of the first complex from the second complex can be observed visually with an unaided eye.
[0586] 40c. The method of any one of embodiments 1c-39c, wherein the increase in the size of the first complex and/or second complex is at least a 2-fold increase.
[0587] 41c. The method of any one of embodiments 1c-40c, wherein the increase in the size of the first complex and/or second complex is at least a 10-fold increase.
[0588] 42c. The method of any one of embodiments 1c-41c, wherein the increase in the size of the first complex and/or second complex is at least a 25-fold increase.
[0589] 43c. The method of any one of embodiments 40c-42c, wherein the increase in size is an increase in the mass of the complex.
[0590] 44c. The method of any one of embodiments 40c-42c, wherein the increase in size is an increase in the diameter of the complex.
[0591] 45c. The method of any one of embodiments 1c-44c, wherein the environmental factor comprises one or more of:

[0592] a. a change in one or more of temperature, pH, salt concentration, concentration of the purification matrix, concentration of the biologic, or pressure;

[0593] b. the addition of one or more surfactants, molecular crowding agents, reducing agents, oxidizing agents, enzymes, or denaturing agents; or

[0594] c. the application of electromagnetic or acoustic waves.
[0595] 46c. The method of any one of embodiments 1c-45c, wherein the separation on the basis of size is performed using tangential flow filtration, analytical ultracentrifugation, membrane chromatography, high performance liquid chromatography, and fast protein liquid chromatography.
[0596] 47c. The method of any one of embodiments 1c-46c, wherein the purification yield of the first biologic is at least 70%, at least 80%, at least 90%, at least 95%, at least 96%, at least 97%, at least 98%, or at least 99%.
[0597] 48c. The method of any one of embodiments 1c-47c, wherein the purification yield of the second biologic is at least 70%, at least 80%, at least 90%, at least 95%, at least 96%, at least 97%, at least 98%, or at least 99%.
   A Method of Bringing a First Biologic Into Proximity with a Second Biologic
[0598] 1d. A method of bringing a first biologic into proximity with a second biologic, the method comprising contacting the first biologic with a first protein-based purification matrix and contacting the second biologic with a second protein-based purification matrix;

[0599] wherein the first biologic binds to the first purification matrix to form a first complex;

[0600] wherein the second biologic binds to the second purification matrix to form a second complex; and
[0601] wherein an environmental factor brings the first complex and the second complex into proximity with one another.
[0602] 2d. The method of embodiment 1d, wherein the first purification matrix comprises (i) a capture domain which binds to the biologic, and (ii) a polypeptide with phase behavior, wherein the capture domain is coupled to the polypeptide with phase behavior.
[0603] 3d. The method of embodiment 1d, wherein the second purification matrix comprises (i) a capture domain which binds to the biologic, and (ii) a polypeptide with phase behavior, wherein the capture domain is coupled to the polypeptide with phase behavior.
[0604] 4d. The method of embodiment 2d or 3d, wherein the capture domain is coupled to the polypeptide with phase behavior via a linker.
[0605] 5d. The method of embodiment 4d, wherein the linker is a peptide linker.
[0606] 6d. The method of embodiment 5d, wherein the peptide linker comprises a protease cleavage site.
[0607] 7d. The method of embodiment 4d, wherein the linker is a chemical linker.
[0608] 8d. The method of embodiment 1d, wherein the first purification matrix comprises a fusion protein comprising (i) a capture domain which binds to the biologic and (ii) a polypeptide with phase behavior.
[0609] 9d. The method of embodiment 1d, wherein the second purification matrix comprises a fusion protein comprising (i) a capture domain which binds to the biologic and (ii) a polypeptide with phase behavior.
[0610] 10d. The method of any one of embodiments 1d-9d, wherein the polypeptide with phase behavior is a resilin-like polypeptide.
[0611] 11d. The method of any one of embodiments 1d-9d, wherein the polypeptide with phase behavior is an elastin-like polypeptide.
[0612] 12d. The method of any one of embodiments 1d-9d or 11d, wherein the polypeptide with phase behavior is a polymer containing a pentapeptide repeat having the sequence (Val-Pro-Gly-Xaa-Gly)ₙ (SEQ ID NO: 10), or a randomized, scrambled analog thereof; wherein Xaa can be any amino acid except proline.
[0613] 13d. The method of embodiment 12d, wherein n is an integer from 1 to 360, inclusive of endpoints.
[0614] 14d. The method of any one of embodiments 1d-9d or 11d, wherein the polypeptide with phase behavior comprises an amino acid sequence selected from:

a.
(SEQ ID NO: 1)
(GRGDSPY)ₙ
b.
(SEQ ID NO: 2)
(GRGDSPH)ₙ
c.
(SEQ ID NO: 3)
(GRGDSPV)ₙ
d.
(SEQ ID NO: 4)
(GRGDSPYG)ₙ
e.
(SEQ ID NO: 5)
(RPLGYDS)ₙ
f.
(SEQ ID NO: 6)
(RPAGYDS)ₙ
g.
(SEQ ID NO: 7)
(GRGDSYP)ₙ
h.
(SEQ ID NO: 8)
(GRGDSPYQ)ₙ
i.
(SEQ ID NO: 9)
(GRGNSPYG)ₙ
j.
(SEQ ID NO: 11)
(GVGVP)ₙ;
k.
(SEQ ID NO: 12)
(GVGVPGLGVPGVGVPGLGVPGVGVP)ₘ;
l.
(SEQ ID NO: 13)
(GVGVPGVGVPGAGVPGVGVPGVGVP)ₘ;
m.
(SEQ ID NO: 14)
(GVGVPGWGVPGVGVPGWGVPGVGVP)ₘ;
n.
(SEQ ID NO: 15)
(GVGVPGVGVPGVGVPGVGVPGVGVPGVGVPGEGVPGFGVPGVGVP)ₘ;
o.
(SEQ ID NO: 16)
(GVGVPGVGVPGVGVPGVGVPGVGVPGVGVPGKGVPGFGVPGVGVP)ₘ;
and
p.
(SEQ ID NO: 17)
(GAGVPGVGVPGAGVPGVGVPGAGVP)ₘ;

or a randomized, scrambled analog thereof;
[0615] wherein:
[0616] n is an integer in the range of 20-360, inclusive of endpoints; and
[0617] m is an integer in the range of 4-25, inclusive of endpoints.
[0618] 15d. The method of any one of embodiments 1d-9d or 11d, wherein the polypeptide with phase behavior comprises an amino acid sequence selected from:

a.
(SEQ ID NO: 52)
(GVGVP)ₘ;
b.
(SEQ ID NO: 57)
(ZZPXXXXGZ)ₘ;
c.
(SEQ ID NO: 58)
(ZZPXGZ)ₘ;
d.
(SEQ ID NO: 59)
(ZZPXXGZ)ₘ;
or
e.
(SEQ ID NO: 60)
(ZZPXXXGZ)ₘ,

wherein m is an integer between 10 and 160, inclusive of endpoints, wherein X if present is any amino acid except proline or glycine, and wherein Z if present is any amino acid.
[0619] 16d. The method of any one of embodiments 1d-9d or 11d, wherein the polypeptide with phase behavior comprises an amino acid sequence selected from:

(a)
(SEQ ID NO: 53)
(GVGVPGVGVPGAGVPGVGVPGVGVP)ₘ; or
(b)
(SEQ ID NO: 55)
(GVGVPGVGVPGLGVPGVGVPGVGVP)ₘ;

wherein m is an integer between 2 and 32, inclusive of endpoints.
[0620] 17d. The method of any one of embodiments 1d-9d or 11d, wherein the polypeptide with phase behavior comprises an amino acid sequence selected from:

[0621] (a) (GVGVPGVGVPGAGVPGVGVPGVGVP)ₘ (SEQ ID NO: 53), wherein m is 8 or 16;

[0622] (b) (GVGVPGAGVP)ₘ (SEQ ID NO: 54), wherein m is an integer between 5 and 80, inclusive of endpoints; or

[0623] (c) (GXGVP)ₘ (SEQ ID NO: 56), wherein m is an integer between 10 and 160, inclusive of endpoints, and wherein X for each repeat is independently selected from the group consisting of glycine, alanine, valine, isoleucine, leucine, phenylalanine, tyrosine, tryptophan, lysine, arginine, aspartic acid, glutamic acid, and serine.
[0624] 18d. The method of any one of embodiments 2d-17d, wherein the capture domain comprises the sequence of any one of SEQ ID NO: 24-49 and 62-148 and 167-171, or a sequence having at least 1, at least 2, at least 3, at least 4, or at least 5 mutations relative thereto.
[0625] 19d. The method of any one of embodiments 1d-18d, wherein the binding of the first biologic and/or second biologic to the purification matrix is reversible.
[0626] 20d. The method of any one of embodiments 1d-18d, wherein the binding of the first biologic and/or second biologic to the purification matrix is non-covalent.
[0627] 21d. The method of any one of embodiments 1d-18d, wherein the binding of the first biologic and/or second biologic to the purification matrix is covalent.
[0628] 22d. The method of any one of embodiments 1d-21d, wherein the first biologic and/or second biologic is selected from a cell, a protein, a lipid, a lipopolysaccharide, a nucleic acid, a carbohydrate, or a viral particle.
[0629] 23d. The method of embodiment 22d, wherein the first biologic and/or second biologic is a cell.
[0630] 24d. The method of embodiment 23d, wherein the cell is a bacterial cell, a yeast cell, or a mammalian cell.
[0631] 25d. The method of embodiment 23d or 24d, wherein the cell is a stem cell, a bone cell, a blood cell, a muscle cell, a fat cell, a skin cell, a nerve cell, an endothelial cell, a sex cell, a pancreatic cell, or a cancer cell.
[0632] 26d. The method of any one of embodiments 23d or 24d, wherein the cell is an immune cell.
[0633] 27d. The method of embodiment 26d, wherein the immune cell is a T cell, a B cell, a NK cell, a peripheral blood mononuclear cell, or a neutrophil.
[0634] 28d. The method of embodiment 27d, wherein the cell is a T cell expressing a chimeric antigen receptor (CAR).
[0635] 29d. The method of embodiment 22d, wherein the nucleic acid is a DNA or an RNA.
[0636] 30d. The method of embodiment 22d, wherein the viral particle is an adenovirus particle, an adeno-associated virus (AAV) particle, a lentivirus particle, a retrovirus particle, a poxvirus particle, a measles virus particle, or a herpesvirus particle.
[0637] 31d. The method of any one of embodiments 1d-30d, wherein the first biologic and/or second biologic has a diameter between 1 nm and 100 μm, inclusive of the endpoints.
[0638] 32d. The method of embodiment 31d, wherein the first biologic and/or second biologic has a diameter between 1 nm and 100 nm, inclusive of the endpoints.
[0639] 33d. The method of embodiment 31d, wherein the first biologic and/or second biologic has a diameter between 100 nm and 1 μm, inclusive of the endpoints.
[0640] 34d. The method of embodiment 31d, wherein the first biologic and/or second biologic has a diameter between 1 μm and 50 μm, inclusive of the endpoints.
[0641] 35d. The method of embodiment 31d, wherein the first biologic and/or second biologic has a diameter between 50 μm and 100 μm, inclusive of the endpoints.
[0642] 36d. The method of any one of embodiments 1d-35d, wherein the method is completed in about 0.5 to about 24 hours.
[0643] 37d. The method of embodiment 36d, wherein the method is completed in about 0.5 to about 8 hours.
[0644] 38d. The method of embodiment 36d, wherein the method is completed in about 2 to about 6 hours.
[0645] 39d. The method of any one of embodiments 1d-38d, wherein the bringing together of the first complex and the second complex can be observed visually with an unaided eye.
[0646] 40d. The method of any one of embodiments 1d-39d, wherein the increase in the size of the first complex and/or second complex is at least a 2-fold increase.
[0647] 41d. The method of any embodiment 40d, wherein the increase in the size of the first complex and/or second complex is at least a 10-fold increase.
[0648] 42d. The method of embodiment 41d, wherein the increase in the size of the first complex and/or second complex is at least a 25-fold increase.
[0649] 43d. The method of any one of embodiments 40d-42d, wherein the increase in size is an increase in the mass of the complex.
[0650] 44d. The method of any one of embodiments 40d-42d, wherein the increase in size is an increase in the diameter of the complex.
[0651] 45d. The method of any one of embodiments 1d-44d, wherein the environmental factor comprises one or more of:

[0652] a. a change in one or more of temperature, pH, salt concentration, concentration of the purification matrix, concentration of the biologic, or pressure;

[0653] b. the addition of one or more surfactants, molecular crowding agents, reducing agents, oxidizing agents, cofactor, vitamin, enzymes, or denaturing agents; or

[0654] c. the application of electromagnetic or acoustic waves.
[0655] 46d. The method of any one of embodiments 1d-45d, wherein the separation on the basis of size is performed using tangential flow filtration, membrane chromatography, analytical ultracentrifugation, high performance liquid chromatography, normal flow filtration, acoustic wave separation, centrifugation, counterflow centrifugation, and fast protein liquid chromatography.

### INCORPORATION BY REFERENCE

[0656] All references, articles, publications, patents, patent publications, and patent applications cited herein are incorporated by reference in their entireties for all purposes. However, mention of any reference, article, publication, patent, patent publication, and patent application cited herein is not, and should not be taken as, an acknowledgment or any form of suggestion that it constitutes valid prior art or form part of the common general knowledge in any country in the world.

What is claimed is:

1. A protein-based purification matrix comprising a fusion protein, wherein the fusion protein comprises:
(i) at least one retrovirus- or lentivirus-binding domain; and
(ii) at least one polypeptide with phase behavior.

2. The protein-based purification matrix of claim 1, wherein binding of the protein-based purification matrix to a viral particle facilitates capture and/or purification of the viral particle.

3. The protein-based purification matrix of claim 1, wherein the lentivirus-binding domain binds a lentivirus particle of the bovine, equine, feline, ovine, caprine, or primate serogroups.

4. The protein-based purification matrix of claim 1, wherein the lentivirus-binding domain comprises the low-density lipoprotein receptor (LDLR), or a fragment or derivative thereof.

5. The protein-based purification matrix of claim 1, wherein the lentivirus-binding domain comprises the sequence of any one of SEQ ID NO: 73-76 or 168-169, or a sequence with at least 90% identity thereto.

6. The protein-based purification matrix of claim 5, wherein the lentivirus-binding domain comprises an amino acid sequence lacking the N-terminal methionine of any one of SEQ ID NOs: 73-76.

7. The protein-based purification matrix of claim 5, wherein the lentivirus-binding domain comprises the sequence of SEQ ID NO: 75.

8. The protein-based purification matrix of claim 5, wherein the lentivirus-binding domain comprises the sequence of SEQ ID NO: 76.

9. The protein-based purification matrix of claim 1, wherein the polypeptide with phase behavior is an elastin-like polypeptide (ELP).

10. The protein-based purification matrix of claim 9, wherein the ELP is a polymer containing a pentapeptide repeat having the sequence (Val-Pro-Gly-Xaa-Gly)ₙ (SEQ ID NO: 10), or a randomized, scrambled analog thereof;
wherein Xaa can be any amino acid except proline; and
wherein n is an integer from 1 to 360, inclusive of endpoints.

11. The protein-based purification matrix of claim 1, wherein the polypeptide with phase behavior comprises an amino acid sequence selected from:
(a)
(SEQ ID NO: 1)
(GRGDSPY)ₙ;
(b)
(SEQ ID NO: 2)
(GRGDSPH)ₙ;
(c)
(SEQ ID NO: 3)
(GRGDSPV)ₙ;
(d)
(SEQ ID NO: 4)
(GRGDSPYG)ₙ;
(e)
(SEQ ID NO: 5)
(RPLGYDS)ₙ;
(f)
(SEQ ID NO: 6)
(RPAGYDS)ₙ;
(g)
(SEQ ID NO: 7)
(GRGDSYP)ₙ;
(h)
(SEQ ID NO: 8)
(GRGDSPYQ)ₙ;
(i)
(SEQ ID NO: 9)
(GRGNSPYG)ₙ;
(j)
(SEQ ID NO: 11)
(GVGVP)ₙ;
(k)
(SEQ ID NO: 12)
(GVGVPGLGVPGVGVPGLGVPGVGVP)ₘ;
(l)
(SEQ ID NO: 13)
(GVGVPGVGVPGAGVPGVGVPGVGVP)ₘ;
(m)
(SEQ ID NO: 14)
(GVGVPGWGVPGVGVPGWGVPGVGVP)ₘ;
(n)
(SEQ ID NO: 15)
(GVGVPGVGVPGVGVPGVGVPGVGVPGVGVPGEGVPG
FGVPGVGVP)ₘ;
(o)
(SEQ ID NO: 16)
(GVGVPGVGVPGVGVPGVGVPGVGVPGVGVPGKGVPG
FGVPGVGVP)ₘ;
(p)
(SEQ ID NO: 17)
(GAGVPGVGVPGAGVPGVGVPGAGVP)ₘ;
and
(q) a randomized, scrambled analog of any of (a) through (q);
wherein n is an integer in the range of 20-360, inclusive of endpoints; and
m is an integer in the range of 4-25, inclusive of endpoints.

12. The protein-based purification matrix of claim 1, wherein the polypeptide with phase behavior comprises an amino acid sequence selected from:
(a)
(SEQ ID NO: 52)
(GVGVP)ₘ;
(b)
(SEQ ID NO: 57)
(ZZPXXXXGZ)ₘ;
(c)
(SEQ ID NO: 58)
(ZZPXGZ)ₘ;
(d)
(SEQ ID NO: 59)
(ZZPXXGZ)ₘ; or
(e)
(SEQ ID NO: 60)
(ZZPXXXGZ)ₘ;
wherein m is an integer between 10 and 160, inclusive of endpoints;
wherein X if present is any amino acid except proline or glycine; and
wherein Z if present is any amino acid.

13. The protein-based purification matrix of claim 1, wherein the polypeptide with phase behavior comprises an amino acid sequence selected from:
(a)
(SEQ ID NO: 53)
(GVGVPGVGVPGAGVPGVGVPGVGVP)ₘ; and
(b)
(SEQ ID NO: 55)
(GVGVPGVGVPGLGVPGVGVPGVGVP)ₘ;
wherein m is an integer between 2 and 32, inclusive of endpoints.

14. The protein-based purification matrix of claim 1, wherein the polypeptide with phase behavior comprises an amino acid sequence selected from:
(a) (GVGVPGVGVPGAGVPGVGVPGVGVP)ₘ (SEQ ID NO: 53), wherein m is 8 or 16;
(b) (GVGVPGAGVP)ₘ (SEQ ID NO: 54), wherein m is an integer between 5 and 80, inclusive of endpoints; and
(c) (GXGVP)ₘ (SEQ ID NO: 56);
wherein m is an integer between 10 and 160, inclusive of endpoints; and
wherein X for each repeat is independently selected from the group consisting of glycine, alanine, valine, isoleucine, leucine, phenylalanine, tyrosine, tryptophan, lysine, arginine, aspartic acid, glutamic acid, and serine.

15. The protein-based purification matrix of claim 1, comprising the sequence of SEQ ID NO: 174 or 175.

16. A method of purifying a lentivirus particle comprising contacting the lentivirus particle with a protein-based purification matrix;
wherein the lentivirus binds to the purification matrix to form a complex;
wherein the size of the complex is increased by a first environmental factor; wherein the complex is separated from at least one contaminant on the basis of size; and
wherein the biologic is separated from the purification matrix by a second environmental factor.

17. The method of claim 16, wherein the protein-based purification matrix comprises a fusion protein comprising at least one lentivirus-binding domain and at least one polypeptide with phase behavior.

18. The method of claim 17, wherein the lentivirus-binding domain comprises the sequence of any one of SEQ ID NO: 73-76 or 168-169, or a sequence with at least 90% identity thereto.

19. The method of claim 17, wherein the lentivirus-binding domain comprises an amino acid sequence lacking the N-terminal methionine of any one of SEQ ID NOs: 73-76.

20. The method of claim 17, wherein the lentivirus-binding domain comprises the sequence of SEQ ID NO: 75.

21. The method of claim 17, wherein the lentivirus-binding domain comprises the sequence of SEQ ID NO: 76.

22. The method of claim 17, wherein the protein-based purification matrix comprises the sequence of SEQ ID NO: 174 or 175.

23. The method of claim 16, wherein the protein-based purification matrix is added to the tissue culture media of cells producing the lentivirus.

24. The method of claim 16, wherein the first environmental factor comprises one or more of:
(a) a change in one or more of temperature, pH, salt concentration, concentration of the purification matrix, concentration of the biologic, or pressure;
(b) the addition of one or more surfactants, cofactor, vitamin, molecular crowding agents, reducing agents, oxidizing agents, enzymes, or denaturing agents; or
(c) the application of electromagnetic or acoustic waves.

25. The method of claim 16, wherein the second environmental factor comprises one or more of:
(a) a change in one or more of temperature, pH, salt concentration, concentration of the purification matrix, concentration of the biologic, or pressure;
(b) the addition of one or more surfactants, cofactor, vitamin, molecular crowding agents, reducing agents, oxidizing agents, enzymes, or denaturing agents; or
(c) the application of electromagnetic or acoustic waves.

26. The method of claim 16, wherein the separation on the basis of size is performed using tangential flow filtration, membrane chromatography, analytical ultracentrifugation, high performance liquid chromatography, membrane chromatography, normal flow filtration, acoustic wave separation, centrifugation, counterflow centrifugation, and fast protein liquid chromatography.

27. The method of claim 16, wherein the at least one contaminant is selected from a solvent, an endotoxin, a protein, a peptide, a nucleic acid, and a carbohydrate.

28. The method of claim 16, wherein the purification yield of the biologic is at least 70%.

The application's sequence listing, which the Patent Office published only in electronic form, follows.

SEQUENCE LISTING (179 sequences)

SEQ ID NO: 1 - protein, 3500 aa, Artificial Sequence
  resilin-like polypeptide
  MISC_FEATURE (8)..(3500): May be present or absent in groups of the repeat unit Gly Arg Gly Asp Ser Pro Tyr
GRGDSPYGRGDSPYGRGDSPYGRGDSPYGRGDSPYGRGDSPYGRGDSPYGRGDSPYGRGDSPYGRGDSPYGRGDSPYGRGDSPYGRGDSPYGRGDSPYGRGDSPYGRGDSPYGRGDSPYGRGDSPYGRGDSPYGRGDSPYGRGDSPYGRGDSPYGRGDSPYGRGDSPYGRGDSPYGRGDSPYGRGDSPYGRGDSPYGRGDSPYGRGDSPYGRGDSPYGRGDSPYGRGDSPYGRGDSPYGRGDSPYGRGDSPYGRGDSPYGRGDSPYGRGDSPYGRGDSPYGRGDSPYGRGDSPYGRGDSPYGRGDSPYGRGDSPYGRGDSPYGRGDSPYGRGDSPYGRGDSPYGRGDSPYGRGDSPYGRGDSPYGRGDSPYGRGDSPYGRGDSPYGRGDSPYGRGDSPYGRGDSPYGRGDSPYGRGDSPYGRGDSPYGRGDSPYGRGDSPYGRGDSPYGRGDSPYGRGDSPYGRGDSPYGRGDSPYGRGDSPYGRGDSPYGRGDSPYGRGDSPYGRGDSPYGRGDSPYGRGDSPYGRGDSPYGRGDSPYGRGDSPYGRGDSPYGRGDSPYGRGDSPYGRGDSPYGRGDSPYGRGDSPYGRGDSPYGRGDSPYGRGDSPYGRGDSPYGRGDSPYGRGDSPYGRGDSPYGRGDSPYGRGDSPYGRGDSPYGRGDSPYGRGDSPYGRGDSPYGRGDSPYGRGDSPYGRGDSPYGRGDSPYGRGDSPYGRGDSPYGRGDSPYGRGDSPYGRGDSPYGRGDSPYGRGDSPYGRGDSPYGRGDSPYGRGDSPYGRGDSPYGRGDSPYGRGDSPYGRGDSPYGRGDSPYGRGDSPYGRGDSPYGRGDSPYGRGDSPYGRGDSPYGRGDSPYGRGDSPYGRGDSPYGRGDSPYGRGDSPYGRGDSPYGRGDSPYGRGDSPYGRGDSPYGRGDSPYGRGDSPYGRGDSPYGRGDSPYGRGDSPYGRGDSPYGRGDSPYGRGDSPYGRGDSPYGRGDSPYGRGDSPYGRGDSPYGRGDSPYGRGDSPYGRGDSPYGRGDSPYGRGDSPYGRGDSPYGRGDSPYGRGDSPYGRGDSPYGRGDSPYGRGDSPYGRGDSPYGRGDSPYGRGDSPYGRGDSPYGRGDSPYGRGDSPYGRGDSPYGRGDSPYGRGDSPYGRGDSPYGRGDSPYGRGDSPYGRGDSPYGRGDSPYGRGDSPYGRGDSPYGRGDSPYGRGDSPYGRGDSPYGRGDSPYGRGDSPYGRGDSPYGRGDSPYGRGDSPYGRGDSPYGRGDSPYGRGDSPYGRGDSPYGRGDSPYGRGDSPYGRGDSPYGRGDSPYGRGDSPYGRGDSPYGRGDSPYGRGDSPYGRGDSPYGRGDSPYGRGDSPYGRGDSPYGRGDSPYGRGDSPYGRGDSPYGRGDSPYGRGDSPYGRGDSPYGRGDSPYGRGDSPYGRGDSPYGRGDSPYGRGDSPYGRGDSPYGRGDSPYGRGDSPYGRGDSPYGRGDSPYGRGDSPYGRGDSPYGRGDSPYGRGDSPYGRGDSPYGRGDSPYGRGDSPYGRGDSPYGRGDSPYGRGDSPYGRGDSPYGRGDSPYGRGDSPYGRGDSPYGRGDSPYGRGDSPYGRGDSPYGRGDSPYGRGDSPYGRGDSPYGRGDSPYGRGDSPYGRGDSPYGRGDSPYGRGDSPYGRGDSPYGRGDSPYGRGDSPYGRGDSPYGRGDSPYGRGDSPYGRGDSPYGRGDSPYGRGDSPYGRGDSPYGRGDSPYGRGDSPYGRGDSPYGRGDSPYGRGDSPYGRGDSPYGRGDSPYGRGDSPYGRGDSPYGRGDSPYGRGDSPYGRGDSPYGRGDSPYGRGDSPYGRGDSPYGRGDSPYGRGDSPYGRGDSPYGRGDSPYGRGDSPYGRGDSPYGRGDSPYGRGDSPYGRGDSPYGRGDSPYGRGDSPYGRGDSPYGRGDSPYGRGDSPYGRGDSPYGRGDSPYGRGDSPYGRGDSPYGRGDSPYGRGDSPYGRGDSPYGRGDSPYGRGDSPYGRGDSPYGRGDSPYGRGDSPYGRGDSPYGRGDSPYGRGDSPYGRGDSPYGRGDSPYGRGDSPYGRGDSPYGRGDSPYGRGDSPYGRGDSPYGRGDSPYGRGDSPYGRGDSPYGRGDSPYGRGDSPYGRGDSPYGRGDSPYGRGDSPYGRGDSPYGRGDSPYGRGDSPYGRGDSPYGRGDSPYGRGDSPYGRGDSPYGRGDSPYGRGDSPYGRGDSPYGRGDSPYGRGDSPYGRGDSPYGRGDSPYGRGDSPYGRGDSPYGRGDSPYGRGDSPYGRGDSPYGRGDSPYGRGDSPYGRGDSPYGRGDSPYGRGDSPYGRGDSPYGRGDSPYGRGDSPYGRGDSPYGRGDSPYGRGDSPYGRGDSPYGRGDSPYGRGDSPYGRGDSPYGRGDSPYGRGDSPYGRGDSPYGRGDSPYGRGDSPYGRGDSPYGRGDSPYGRGDSPYGRGDSPYGRGDSPYGRGDSPYGRGDSPYGRGDSPYGRGDSPYGRGDSPYGRGDSPYGRGDSPYGRGDSPYGRGDSPYGRGDSPYGRGDSPYGRGDSPYGRGDSPYGRGDSPYGRGDSPYGRGDSPYGRGDSPYGRGDSPYGRGDSPYGRGDSPYGRGDSPYGRGDSPYGRGDSPYGRGDSPYGRGDSPYGRGDSPYGRGDSPYGRGDSPYGRGDSPYGRGDSPYGRGDSPYGRGDSPYGRGDSPYGRGDSPYGRGDSPYGRGDSPYGRGDSPYGRGDSPYGRGDSPYGRGDSPYGRGDSPYGRGDSPYGRGDSPYGRGDSPYGRGDSPYGRGDSPYGRGDSPYGRGDSPYGRGDSPYGRGDSPYGRGDSPYGRGDSPYGRGDSPYGRGDSPYGRGDSPYGRGDSPYGRGDSPYGRGDSPYGRGDSPYGRGDSPYGRGDSPYGRGDSPYGRGDSPYGRGDSPYGRGDSPYGRGDSPYGRGDSPYGRGDSPYGRGDSPYGRGDSPYGRGDSPYGRGDSPYGRGDSPYGRGDSPYGRGDSPYGRGDSPYGRGDSPYGRGDSPYGRGDSPYGRGDSPYGRGDSPYGRGDSPYGRGDSPYGRGDSPYGRGDSPYGRGDSPYGRGDSPYGRGDSPYGRGDSPYGRGDSPYGRGDSPYGRGDSPYGRGDSPYGRGDSPYGRGDSPYGRGDSPYGRGDSPYGRGDSPYGRGDSPYGRGDSPYGRGDSPYGRGDSPYGRGDSPYGRGDSPYGRGDSPYGRGDSPYGRGDSPYGRGDSPYGRGDSPYGRGDSPYGRGDSPYGRGDSPYGRGDSPYGRGDSPYGRGDSPYGRGDSPYGRGDSPYGRGDSPYGRGDSPYGRGDSPYGRGDSPYGRGDSPYGRGDSPYGRGDSPYGRGDSPYGRGDSPYGRGDSPYGRGDSPYGRGDSPYGRGDSPYGRGDSPYGRGDSPYGRGDSPYGRGDSPYGRGDSPYGRGDSPYGRGDSPYGRGDSPYGRGDSPYGRGDSPYGRGDSPYGRGDSPYGRGDSPYGRGDSPYGRGDSPYGRGDSPYGRGDSPYGRGDSPYGRGDSPYGRGDSPYGRGDSPYGRGDSPYGRGDSPY

SEQ ID NO: 2 - protein, 3500 aa, Artificial Sequence
  resilin-like polypeptide
  MISC_FEATURE (8)..(3500): May be present or absent in groups of the repeat unit Gly Arg Gly Asp Ser Pro His
GRGDSPHGRGDSPHGRGDSPHGRGDSPHGRGDSPHGRGDSPHGRGDSPHGRGDSPHGRGDSPHGRGDSPHGRGDSPHGRGDSPHGRGDSPHGRGDSPHGRGDSPHGRGDSPHGRGDSPHGRGDSPHGRGDSPHGRGDSPHGRGDSPHGRGDSPHGRGDSPHGRGDSPHGRGDSPHGRGDSPHGRGDSPHGRGDSPHGRGDSPHGRGDSPHGRGDSPHGRGDSPHGRGDSPHGRGDSPHGRGDSPHGRGDSPHGRGDSPHGRGDSPHGRGDSPHGRGDSPHGRGDSPHGRGDSPHGRGDSPHGRGDSPHGRGDSPHGRGDSPHGRGDSPHGRGDSPHGRGDSPHGRGDSPHGRGDSPHGRGDSPHGRGDSPHGRGDSPHGRGDSPHGRGDSPHGRGDSPHGRGDSPHGRGDSPHGRGDSPHGRGDSPHGRGDSPHGRGDSPHGRGDSPHGRGDSPHGRGDSPHGRGDSPHGRGDSPHGRGDSPHGRGDSPHGRGDSPHGRGDSPHGRGDSPHGRGDSPHGRGDSPHGRGDSPHGRGDSPHGRGDSPHGRGDSPHGRGDSPHGRGDSPHGRGDSPHGRGDSPHGRGDSPHGRGDSPHGRGDSPHGRGDSPHGRGDSPHGRGDSPHGRGDSPHGRGDSPHGRGDSPHGRGDSPHGRGDSPHGRGDSPHGRGDSPHGRGDSPHGRGDSPHGRGDSPHGRGDSPHGRGDSPHGRGDSPHGRGDSPHGRGDSPHGRGDSPHGRGDSPHGRGDSPHGRGDSPHGRGDSPHGRGDSPHGRGDSPHGRGDSPHGRGDSPHGRGDSPHGRGDSPHGRGDSPHGRGDSPHGRGDSPHGRGDSPHGRGDSPHGRGDSPHGRGDSPHGRGDSPHGRGDSPHGRGDSPHGRGDSPHGRGDSPHGRGDSPHGRGDSPHGRGDSPHGRGDSPHGRGDSPHGRGDSPHGRGDSPHGRGDSPHGRGDSPHGRGDSPHGRGDSPHGRGDSPHGRGDSPHGRGDSPHGRGDSPHGRGDSPHGRGDSPHGRGDSPHGRGDSPHGRGDSPHGRGDSPHGRGDSPHGRGDSPHGRGDSPHGRGDSPHGRGDSPHGRGDSPHGRGDSPHGRGDSPHGRGDSPHGRGDSPHGRGDSPHGRGDSPHGRGDSPHGRGDSPHGRGDSPHGRGDSPHGRGDSPHGRGDSPHGRGDSPHGRGDSPHGRGDSPHGRGDSPHGRGDSPHGRGDSPHGRGDSPHGRGDSPHGRGDSPHGRGDSPHGRGDSPHGRGDSPHGRGDSPHGRGDSPHGRGDSPHGRGDSPHGRGDSPHGRGDSPHGRGDSPHGRGDSPHGRGDSPHGRGDSPHGRGDSPHGRGDSPHGRGDSPHGRGDSPHGRGDSPHGRGDSPHGRGDSPHGRGDSPHGRGDSPHGRGDSPHGRGDSPHGRGDSPHGRGDSPHGRGDSPHGRGDSPHGRGDSPHGRGDSPHGRGDSPHGRGDSPHGRGDSPHGRGDSPHGRGDSPHGRGDSPHGRGDSPHGRGDSPHGRGDSPHGRGDSPHGRGDSPHGRGDSPHGRGDSPHGRGDSPHGRGDSPHGRGDSPHGRGDSPHGRGDSPHGRGDSPHGRGDSPHGRGDSPHGRGDSPHGRGDSPHGRGDSPHGRGDSPHGRGDSPHGRGDSPHGRGDSPHGRGDSPHGRGDSPHGRGDSPHGRGDSPHGRGDSPHGRGDSPHGRGDSPHGRGDSPHGRGDSPHGRGDSPHGRGDSPHGRGDSPHGRGDSPHGRGDSPHGRGDSPHGRGDSPHGRGDSPHGRGDSPHGRGDSPHGRGDSPHGRGDSPHGRGDSPHGRGDSPHGRGDSPHGRGDSPHGRGDSPHGRGDSPHGRGDSPHGRGDSPHGRGDSPHGRGDSPHGRGDSPHGRGDSPHGRGDSPHGRGDSPHGRGDSPHGRGDSPHGRGDSPHGRGDSPHGRGDSPHGRGDSPHGRGDSPHGRGDSPHGRGDSPHGRGDSPHGRGDSPHGRGDSPHGRGDSPHGRGDSPHGRGDSPHGRGDSPHGRGDSPHGRGDSPHGRGDSPHGRGDSPHGRGDSPHGRGDSPHGRGDSPHGRGDSPHGRGDSPHGRGDSPHGRGDSPHGRGDSPHGRGDSPHGRGDSPHGRGDSPHGRGDSPHGRGDSPHGRGDSPHGRGDSPHGRGDSPHGRGDSPHGRGDSPHGRGDSPHGRGDSPHGRGDSPHGRGDSPHGRGDSPHGRGDSPHGRGDSPHGRGDSPHGRGDSPHGRGDSPHGRGDSPHGRGDSPHGRGDSPHGRGDSPHGRGDSPHGRGDSPHGRGDSPHGRGDSPHGRGDSPHGRGDSPHGRGDSPHGRGDSPHGRGDSPHGRGDSPHGRGDSPHGRGDSPHGRGDSPHGRGDSPHGRGDSPHGRGDSPHGRGDSPHGRGDSPHGRGDSPHGRGDSPHGRGDSPHGRGDSPHGRGDSPHGRGDSPHGRGDSPHGRGDSPHGRGDSPHGRGDSPHGRGDSPHGRGDSPHGRGDSPHGRGDSPHGRGDSPHGRGDSPHGRGDSPHGRGDSPHGRGDSPHGRGDSPHGRGDSPHGRGDSPHGRGDSPHGRGDSPHGRGDSPHGRGDSPHGRGDSPHGRGDSPHGRGDSPHGRGDSPHGRGDSPHGRGDSPHGRGDSPHGRGDSPHGRGDSPHGRGDSPHGRGDSPHGRGDSPHGRGDSPHGRGDSPHGRGDSPHGRGDSPHGRGDSPHGRGDSPHGRGDSPHGRGDSPHGRGDSPHGRGDSPHGRGDSPHGRGDSPHGRGDSPHGRGDSPHGRGDSPHGRGDSPHGRGDSPHGRGDSPHGRGDSPHGRGDSPHGRGDSPHGRGDSPHGRGDSPHGRGDSPHGRGDSPHGRGDSPHGRGDSPHGRGDSPHGRGDSPHGRGDSPHGRGDSPHGRGDSPHGRGDSPHGRGDSPHGRGDSPHGRGDSPHGRGDSPHGRGDSPHGRGDSPHGRGDSPHGRGDSPHGRGDSPHGRGDSPHGRGDSPHGRGDSPHGRGDSPHGRGDSPHGRGDSPHGRGDSPHGRGDSPHGRGDSPHGRGDSPHGRGDSPHGRGDSPHGRGDSPHGRGDSPHGRGDSPHGRGDSPHGRGDSPHGRGDSPHGRGDSPHGRGDSPHGRGDSPHGRGDSPHGRGDSPHGRGDSPHGRGDSPHGRGDSPHGRGDSPHGRGDSPHGRGDSPHGRGDSPHGRGDSPHGRGDSPHGRGDSPHGRGDSPHGRGDSPHGRGDSPHGRGDSPHGRGDSPHGRGDSPHGRGDSPHGRGDSPHGRGDSPHGRGDSPHGRGDSPHGRGDSPHGRGDSPHGRGDSPHGRGDSPHGRGDSPHGRGDSPHGRGDSPHGRGDSPHGRGDSPHGRGDSPHGRGDSPHGRGDSPHGRGDSPHGRGDSPHGRGDSPHGRGDSPHGRGDSPHGRGDSPHGRGDSPHGRGDSPHGRGDSPHGRGDSPHGRGDSPHGRGDSPHGRGDSPHGRGDSPHGRGDSPHGRGDSPHGRGDSPHGRGDSPHGRGDSPHGRGDSPHGRGDSPHGRGDSPHGRGDSPHGRGDSPHGRGDSPHGRGDSPH

SEQ ID NO: 3 - protein, 3500 aa, Artificial Sequence
  resilin-like polypeptide
  MISC_FEATURE (8)..(3500): May be present or absent in groups of the repeat unit Gly Arg Gly Asp Ser Pro Val
GRGDSPVGRGDSPVGRGDSPVGRGDSPVGRGDSPVGRGDSPVGRGDSPVGRGDSPVGRGDSPVGRGDSPVGRGDSPVGRGDSPVGRGDSPVGRGDSPVGRGDSPVGRGDSPVGRGDSPVGRGDSPVGRGDSPVGRGDSPVGRGDSPVGRGDSPVGRGDSPVGRGDSPVGRGDSPVGRGDSPVGRGDSPVGRGDSPVGRGDSPVGRGDSPVGRGDSPVGRGDSPVGRGDSPVGRGDSPVGRGDSPVGRGDSPVGRGDSPVGRGDSPVGRGDSPVGRGDSPVGRGDSPVGRGDSPVGRGDSPVGRGDSPVGRGDSPVGRGDSPVGRGDSPVGRGDSPVGRGDSPVGRGDSPVGRGDSPVGRGDSPVGRGDSPVGRGDSPVGRGDSPVGRGDSPVGRGDSPVGRGDSPVGRGDSPVGRGDSPVGRGDSPVGRGDSPVGRGDSPVGRGDSPVGRGDSPVGRGDSPVGRGDSPVGRGDSPVGRGDSPVGRGDSPVGRGDSPVGRGDSPVGRGDSPVGRGDSPVGRGDSPVGRGDSPVGRGDSPVGRGDSPVGRGDSPVGRGDSPVGRGDSPVGRGDSPVGRGDSPVGRGDSPVGRGDSPVGRGDSPVGRGDSPVGRGDSPVGRGDSPVGRGDSPVGRGDSPVGRGDSPVGRGDSPVGRGDSPVGRGDSPVGRGDSPVGRGDSPVGRGDSPVGRGDSPVGRGDSPVGRGDSPVGRGDSPVGRGDSPVGRGDSPVGRGDSPVGRGDSPVGRGDSPVGRGDSPVGRGDSPVGRGDSPVGRGDSPVGRGDSPVGRGDSPVGRGDSPVGRGDSPVGRGDSPVGRGDSPVGRGDSPVGRGDSPVGRGDSPVGRGDSPVGRGDSPVGRGDSPVGRGDSPVGRGDSPVGRGDSPVGRGDSPVGRGDSPVGRGDSPVGRGDSPVGRGDSPVGRGDSPVGRGDSPVGRGDSPVGRGDSPVGRGDSPVGRGDSPVGRGDSPVGRGDSPVGRGDSPVGRGDSPVGRGDSPVGRGDSPVGRGDSPVGRGDSPVGRGDSPVGRGDSPVGRGDSPVGRGDSPVGRGDSPVGRGDSPVGRGDSPVGRGDSPVGRGDSPVGRGDSPVGRGDSPVGRGDSPVGRGDSPVGRGDSPVGRGDSPVGRGDSPVGRGDSPVGRGDSPVGRGDSPVGRGDSPVGRGDSPVGRGDSPVGRGDSPVGRGDSPVGRGDSPVGRGDSPVGRGDSPVGRGDSPVGRGDSPVGRGDSPVGRGDSPVGRGDSPVGRGDSPVGRGDSPVGRGDSPVGRGDSPVGRGDSPVGRGDSPVGRGDSPVGRGDSPVGRGDSPVGRGDSPVGRGDSPVGRGDSPVGRGDSPVGRGDSPVGRGDSPVGRGDSPVGRGDSPVGRGDSPVGRGDSPVGRGDSPVGRGDSPVGRGDSPVGRGDSPVGRGDSPVGRGDSPVGRGDSPVGRGDSPVGRGDSPVGRGDSPVGRGDSPVGRGDSPVGRGDSPVGRGDSPVGRGDSPVGRGDSPVGRGDSPVGRGDSPVGRGDSPVGRGDSPVGRGDSPVGRGDSPVGRGDSPVGRGDSPVGRGDSPVGRGDSPVGRGDSPVGRGDSPVGRGDSPVGRGDSPVGRGDSPVGRGDSPVGRGDSPVGRGDSPVGRGDSPVGRGDSPVGRGDSPVGRGDSPVGRGDSPVGRGDSPVGRGDSPVGRGDSPVGRGDSPVGRGDSPVGRGDSPVGRGDSPVGRGDSPVGRGDSPVGRGDSPVGRGDSPVGRGDSPVGRGDSPVGRGDSPVGRGDSPVGRGDSPVGRGDSPVGRGDSPVGRGDSPVGRGDSPVGRGDSPVGRGDSPVGRGDSPVGRGDSPVGRGDSPVGRGDSPVGRGDSPVGRGDSPVGRGDSPVGRGDSPVGRGDSPVGRGDSPVGRGDSPVGRGDSPVGRGDSPVGRGDSPVGRGDSPVGRGDSPVGRGDSPVGRGDSPVGRGDSPVGRGDSPVGRGDSPVGRGDSPVGRGDSPVGRGDSPVGRGDSPVGRGDSPVGRGDSPVGRGDSPVGRGDSPVGRGDSPVGRGDSPVGRGDSPVGRGDSPVGRGDSPVGRGDSPVGRGDSPVGRGDSPVGRGDSPVGRGDSPVGRGDSPVGRGDSPVGRGDSPVGRGDSPVGRGDSPVGRGDSPVGRGDSPVGRGDSPVGRGDSPVGRGDSPVGRGDSPVGRGDSPVGRGDSPVGRGDSPVGRGDSPVGRGDSPVGRGDSPVGRGDSPVGRGDSPVGRGDSPVGRGDSPVGRGDSPVGRGDSPVGRGDSPVGRGDSPVGRGDSPVGRGDSPVGRGDSPVGRGDSPVGRGDSPVGRGDSPVGRGDSPVGRGDSPVGRGDSPVGRGDSPVGRGDSPVGRGDSPVGRGDSPVGRGDSPVGRGDSPVGRGDSPVGRGDSPVGRGDSPVGRGDSPVGRGDSPVGRGDSPVGRGDSPVGRGDSPVGRGDSPVGRGDSPVGRGDSPVGRGDSPVGRGDSPVGRGDSPVGRGDSPVGRGDSPVGRGDSPVGRGDSPVGRGDSPVGRGDSPVGRGDSPVGRGDSPVGRGDSPVGRGDSPVGRGDSPVGRGDSPVGRGDSPVGRGDSPVGRGDSPVGRGDSPVGRGDSPVGRGDSPVGRGDSPVGRGDSPVGRGDSPVGRGDSPVGRGDSPVGRGDSPVGRGDSPVGRGDSPVGRGDSPVGRGDSPVGRGDSPVGRGDSPVGRGDSPVGRGDSPVGRGDSPVGRGDSPVGRGDSPVGRGDSPVGRGDSPVGRGDSPVGRGDSPVGRGDSPVGRGDSPVGRGDSPVGRGDSPVGRGDSPVGRGDSPVGRGDSPVGRGDSPVGRGDSPVGRGDSPVGRGDSPVGRGDSPVGRGDSPVGRGDSPVGRGDSPVGRGDSPVGRGDSPVGRGDSPVGRGDSPVGRGDSPVGRGDSPVGRGDSPVGRGDSPVGRGDSPVGRGDSPVGRGDSPVGRGDSPVGRGDSPVGRGDSPVGRGDSPVGRGDSPVGRGDSPVGRGDSPVGRGDSPVGRGDSPVGRGDSPVGRGDSPVGRGDSPVGRGDSPVGRGDSPVGRGDSPVGRGDSPVGRGDSPVGRGDSPVGRGDSPVGRGDSPVGRGDSPVGRGDSPVGRGDSPVGRGDSPVGRGDSPVGRGDSPVGRGDSPVGRGDSPVGRGDSPVGRGDSPVGRGDSPVGRGDSPVGRGDSPVGRGDSPVGRGDSPVGRGDSPVGRGDSPVGRGDSPVGRGDSPVGRGDSPVGRGDSPVGRGDSPVGRGDSPVGRGDSPVGRGDSPVGRGDSPVGRGDSPVGRGDSPVGRGDSPVGRGDSPVGRGDSPVGRGDSPVGRGDSPVGRGDSPVGRGDSPVGRGDSPVGRGDSPVGRGDSPVGRGDSPVGRGDSPVGRGDSPVGRGDSPVGRGDSPVGRGDSPVGRGDSPVGRGDSPVGRGDSPVGRGDSPVGRGDSPVGRGDSPVGRGDSPVGRGDSPVGRGDSPVGRGDSPVGRGDSPVGRGDSPVGRGDSPVGRGDSPVGRGDSPVGRGDSPVGRGDSPVGRGDSPVGRGDSPVGRGDSPVGRGDSPV

SEQ ID NO: 4 - protein, 4000 aa, Artificial Sequence
  resilin-like polypeptide
  MISC_FEATURE (9)..(4000): May be present or absent in groups of the repeat unit Gly Arg Gly Asp Ser Pro Tyr Gly
GRGDSPYGGRGDSPYGGRGDSPYGGRGDSPYGGRGDSPYGGRGDSPYGGRGDSPYGGRGDSPYGGRGDSPYGGRGDSPYGGRGDSPYGGRGDSPYGGRGDSPYGGRGDSPYGGRGDSPYGGRGDSPYGGRGDSPYGGRGDSPYGGRGDSPYGGRGDSPYGGRGDSPYGGRGDSPYGGRGDSPYGGRGDSPYGGRGDSPYGGRGDSPYGGRGDSPYGGRGDSPYGGRGDSPYGGRGDSPYGGRGDSPYGGRGDSPYGGRGDSPYGGRGDSPYGGRGDSPYGGRGDSPYGGRGDSPYGGRGDSPYGGRGDSPYGGRGDSPYGGRGDSPYGGRGDSPYGGRGDSPYGGRGDSPYGGRGDSPYGGRGDSPYGGRGDSPYGGRGDSPYGGRGDSPYGGRGDSPYGGRGDSPYGGRGDSPYGGRGDSPYGGRGDSPYGGRGDSPYGGRGDSPYGGRGDSPYGGRGDSPYGGRGDSPYGGRGDSPYGGRGDSPYGGRGDSPYGGRGDSPYGGRGDSPYGGRGDSPYGGRGDSPYGGRGDSPYGGRGDSPYGGRGDSPYGGRGDSPYGGRGDSPYGGRGDSPYGGRGDSPYGGRGDSPYGGRGDSPYGGRGDSPYGGRGDSPYGGRGDSPYGGRGDSPYGGRGDSPYGGRGDSPYGGRGDSPYGGRGDSPYGGRGDSPYGGRGDSPYGGRGDSPYGGRGDSPYGGRGDSPYGGRGDSPYGGRGDSPYGGRGDSPYGGRGDSPYGGRGDSPYGGRGDSPYGGRGDSPYGGRGDSPYGGRGDSPYGGRGDSPYGGRGDSPYGGRGDSPYGGRGDSPYGGRGDSPYGGRGDSPYGGRGDSPYGGRGDSPYGGRGDSPYGGRGDSPYGGRGDSPYGGRGDSPYGGRGDSPYGGRGDSPYGGRGDSPYGGRGDSPYGGRGDSPYGGRGDSPYGGRGDSPYGGRGDSPYGGRGDSPYGGRGDSPYGGRGDSPYGGRGDSPYGGRGDSPYGGRGDSPYGGRGDSPYGGRGDSPYGGRGDSPYGGRGDSPYGGRGDSPYGGRGDSPYGGRGDSPYGGRGDSPYGGRGDSPYGGRGDSPYGGRGDSPYGGRGDSPYGGRGDSPYGGRGDSPYGGRGDSPYGGRGDSPYGGRGDSPYGGRGDSPYGGRGDSPYGGRGDSPYGGRGDSPYGGRGDSPYGGRGDSPYGGRGDSPYGGRGDSPYGGRGDSPYGGRGDSPYGGRGDSPYGGRGDSPYGGRGDSPYGGRGDSPYGGRGDSPYGGRGDSPYGGRGDSPYGGRGDSPYGGRGDSPYGGRGDSPYGGRGDSPYGGRGDSPYGGRGDSPYGGRGDSPYGGRGDSPYGGRGDSPYGGRGDSPYGGRGDSPYGGRGDSPYGGRGDSPYGGRGDSPYGGRGDSPYGGRGDSPYGGRGDSPYGGRGDSPYGGRGDSPYGGRGDSPYGGRGDSPYGGRGDSPYGGRGDSPYGGRGDSPYGGRGDSPYGGRGDSPYGGRGDSPYGGRGDSPYGGRGDSPYGGRGDSPYGGRGDSPYGGRGDSPYGGRGDSPYGGRGDSPYGGRGDSPYGGRGDSPYGGRGDSPYGGRGDSPYGGRGDSPYGGRGDSPYGGRGDSPYGGRGDSPYGGRGDSPYGGRGDSPYGGRGDSPYGGRGDSPYGGRGDSPYGGRGDSPYGGRGDSPYGGRGDSPYGGRGDSPYGGRGDSPYGGRGDSPYGGRGDSPYGGRGDSPYGGRGDSPYGGRGDSPYGGRGDSPYGGRGDSPYGGRGDSPYGGRGDSPYGGRGDSPYGGRGDSPYGGRGDSPYGGRGDSPYGGRGDSPYGGRGDSPYGGRGDSPYGGRGDSPYGGRGDSPYGGRGDSPYGGRGDSPYGGRGDSPYGGRGDSPYGGRGDSPYGGRGDSPYGGRGDSPYGGRGDSPYGGRGDSPYGGRGDSPYGGRGDSPYGGRGDSPYGGRGDSPYGGRGDSPYGGRGDSPYGGRGDSPYGGRGDSPYGGRGDSPYGGRGDSPYGGRGDSPYGGRGDSPYGGRGDSPYGGRGDSPYGGRGDSPYGGRGDSPYGGRGDSPYGGRGDSPYGGRGDSPYGGRGDSPYGGRGDSPYGGRGDSPYGGRGDSPYGGRGDSPYGGRGDSPYGGRGDSPYGGRGDSPYGGRGDSPYGGRGDSPYGGRGDSPYGGRGDSPYGGRGDSPYGGRGDSPYGGRGDSPYGGRGDSPYGGRGDSPYGGRGDSPYGGRGDSPYGGRGDSPYGGRGDSPYGGRGDSPYGGRGDSPYGGRGDSPYGGRGDSPYGGRGDSPYGGRGDSPYGGRGDSPYGGRGDSPYGGRGDSPYGGRGDSPYGGRGDSPYGGRGDSPYGGRGDSPYGGRGDSPYGGRGDSPYGGRGDSPYGGRGDSPYGGRGDSPYGGRGDSPYGGRGDSPYGGRGDSPYGGRGDSPYGGRGDSPYGGRGDSPYGGRGDSPYGGRGDSPYGGRGDSPYGGRGDSPYGGRGDSPYGGRGDSPYGGRGDSPYGGRGDSPYGGRGDSPYGGRGDSPYGGRGDSPYGGRGDSPYGGRGDSPYGGRGDSPYGGRGDSPYGGRGDSPYGGRGDSPYGGRGDSPYGGRGDSPYGGRGDSPYGGRGDSPYGGRGDSPYGGRGDSPYGGRGDSPYGGRGDSPYGGRGDSPYGGRGDSPYGGRGDSPYGGRGDSPYGGRGDSPYGGRGDSPYGGRGDSPYGGRGDSPYGGRGDSPYGGRGDSPYGGRGDSPYGGRGDSPYGGRGDSPYGGRGDSPYGGRGDSPYGGRGDSPYGGRGDSPYGGRGDSPYGGRGDSPYGGRGDSPYGGRGDSPYGGRGDSPYGGRGDSPYGGRGDSPYGGRGDSPYGGRGDSPYGGRGDSPYGGRGDSPYGGRGDSPYGGRGDSPYGGRGDSPYGGRGDSPYGGRGDSPYGGRGDSPYGGRGDSPYGGRGDSPYGGRGDSPYGGRGDSPYGGRGDSPYGGRGDSPYGGRGDSPYGGRGDSPYGGRGDSPYGGRGDSPYGGRGDSPYGGRGDSPYGGRGDSPYGGRGDSPYGGRGDSPYGGRGDSPYGGRGDSPYGGRGDSPYGGRGDSPYGGRGDSPYGGRGDSPYGGRGDSPYGGRGDSPYGGRGDSPYGGRGDSPYGGRGDSPYGGRGDSPYGGRGDSPYGGRGDSPYGGRGDSPYGGRGDSPYGGRGDSPYGGRGDSPYGGRGDSPYGGRGDSPYGGRGDSPYGGRGDSPYGGRGDSPYGGRGDSPYGGRGDSPYGGRGDSPYGGRGDSPYGGRGDSPYGGRGDSPYGGRGDSPYGGRGDSPYGGRGDSPYGGRGDSPYGGRGDSPYGGRGDSPYGGRGDSPYGGRGDSPYGGRGDSPYGGRGDSPYGGRGDSPYGGRGDSPYGGRGDSPYGGRGDSPYGGRGDSPYGGRGDSPYGGRGDSPYGGRGDSPYGGRGDSPYGGRGDSPYGGRGDSPYGGRGDSPYGGRGDSPYGGRGDSPYGGRGDSPYGGRGDSPYGGRGDSPYGGRGDSPYGGRGDSPYGGRGDSPYGGRGDSPYGGRGDSPYGGRGDSPYGGRGDSPYGGRGDSPYGGRGDSPYGGRGDSPYGGRGDSPYGGRGDSPYGGRGDSPYGGRGDSPYGGRGDSPYGGRGDSPYGGRGDSPYGGRGDSPYGGRGDSPYGGRGDSPYGGRGDSPYGGRGDSPYGGRGDSPYGGRGDSPYGGRGDSPYGGRGDSPYGGRGDSPYGGRGDSPYGGRGDSPYGGRGDSPYGGRGDSPYGGRGDSPYGGRGDSPYGGRGDSPYGGRGDSPYGGRGDSPYGGRGDSPYGGRGDSPYGGRGDSPYGGRGDSPYGGRGDSPYGGRGDSPYGGRGDSPYGGRGDSPYGGRGDSPYGGRGDSPYGGRGDSPYGGRGDSPYGGRGDSPYGGRGDSPYGGRGDSPYGGRGDSPYGGRGDSPYGGRGDSPYGGRGDSPYGGRGDSPYGGRGDSPYGGRGDSPYGGRGDSPYGGRGDSPYGGRGDSPYGGRGDSPYGGRGDSPYGGRGDSPYGGRGDSPYGGRGDSPYGGRGDSPYGGRGDSPYGGRGDSPYGGRGDSPYG

SEQ ID NO: 5 - protein, 3500 aa, Artificial Sequence
  resilin-like polypeptide
  MISC_FEATURE (8)..(3500): May be present or absent in groups of the repeat unit Arg Pro Leu Gly Tyr Asp Ser
RPLGYDSRPLGYDSRPLGYDSRPLGYDSRPLGYDSRPLGYDSRPLGYDSRPLGYDSRPLGYDSRPLGYDSRPLGYDSRPLGYDSRPLGYDSRPLGYDSRPLGYDSRPLGYDSRPLGYDSRPLGYDSRPLGYDSRPLGYDSRPLGYDSRPLGYDSRPLGYDSRPLGYDSRPLGYDSRPLGYDSRPLGYDSRPLGYDSRPLGYDSRPLGYDSRPLGYDSRPLGYDSRPLGYDSRPLGYDSRPLGYDSRPLGYDSRPLGYDSRPLGYDSRPLGYDSRPLGYDSRPLGYDSRPLGYDSRPLGYDSRPLGYDSRPLGYDSRPLGYDSRPLGYDSRPLGYDSRPLGYDSRPLGYDSRPLGYDSRPLGYDSRPLGYDSRPLGYDSRPLGYDSRPLGYDSRPLGYDSRPLGYDSRPLGYDSRPLGYDSRPLGYDSRPLGYDSRPLGYDSRPLGYDSRPLGYDSRPLGYDSRPLGYDSRPLGYDSRPLGYDSRPLGYDSRPLGYDSRPLGYDSRPLGYDSRPLGYDSRPLGYDSRPLGYDSRPLGYDSRPLGYDSRPLGYDSRPLGYDSRPLGYDSRPLGYDSRPLGYDSRPLGYDSRPLGYDSRPLGYDSRPLGYDSRPLGYDSRPLGYDSRPLGYDSRPLGYDSRPLGYDSRPLGYDSRPLGYDSRPLGYDSRPLGYDSRPLGYDSRPLGYDSRPLGYDSRPLGYDSRPLGYDSRPLGYDSRPLGYDSRPLGYDSRPLGYDSRPLGYDSRPLGYDSRPLGYDSRPLGYDSRPLGYDSRPLGYDSRPLGYDSRPLGYDSRPLGYDSRPLGYDSRPLGYDSRPLGYDSRPLGYDSRPLGYDSRPLGYDSRPLGYDSRPLGYDSRPLGYDSRPLGYDSRPLGYDSRPLGYDSRPLGYDSRPLGYDSRPLGYDSRPLGYDSRPLGYDSRPLGYDSRPLGYDSRPLGYDSRPLGYDSRPLGYDSRPLGYDSRPLGYDSRPLGYDSRPLGYDSRPLGYDSRPLGYDSRPLGYDSRPLGYDSRPLGYDSRPLGYDSRPLGYDSRPLGYDSRPLGYDSRPLGYDSRPLGYDSRPLGYDSRPLGYDSRPLGYDSRPLGYDSRPLGYDSRPLGYDSRPLGYDSRPLGYDSRPLGYDSRPLGYDSRPLGYDSRPLGYDSRPLGYDSRPLGYDSRPLGYDSRPLGYDSRPLGYDSRPLGYDSRPLGYDSRPLGYDSRPLGYDSRPLGYDSRPLGYDSRPLGYDSRPLGYDSRPLGYDSRPLGYDSRPLGYDSRPLGYDSRPLGYDSRPLGYDSRPLGYDSRPLGYDSRPLGYDSRPLGYDSRPLGYDSRPLGYDSRPLGYDSRPLGYDSRPLGYDSRPLGYDSRPLGYDSRPLGYDSRPLGYDSRPLGYDSRPLGYDSRPLGYDSRPLGYDSRPLGYDSRPLGYDSRPLGYDSRPLGYDSRPLGYDSRPLGYDSRPLGYDSRPLGYDSRPLGYDSRPLGYDSRPLGYDSRPLGYDSRPLGYDSRPLGYDSRPLGYDSRPLGYDSRPLGYDSRPLGYDSRPLGYDSRPLGYDSRPLGYDSRPLGYDSRPLGYDSRPLGYDSRPLGYDSRPLGYDSRPLGYDSRPLGYDSRPLGYDSRPLGYDSRPLGYDSRPLGYDSRPLGYDSRPLGYDSRPLGYDSRPLGYDSRPLGYDSRPLGYDSRPLGYDSRPLGYDSRPLGYDSRPLGYDSRPLGYDSRPLGYDSRPLGYDSRPLGYDSRPLGYDSRPLGYDSRPLGYDSRPLGYDSRPLGYDSRPLGYDSRPLGYDSRPLGYDSRPLGYDSRPLGYDSRPLGYDSRPLGYDSRPLGYDSRPLGYDSRPLGYDSRPLGYDSRPLGYDSRPLGYDSRPLGYDSRPLGYDSRPLGYDSRPLGYDSRPLGYDSRPLGYDSRPLGYDSRPLGYDSRPLGYDSRPLGYDSRPLGYDSRPLGYDSRPLGYDSRPLGYDSRPLGYDSRPLGYDSRPLGYDSRPLGYDSRPLGYDSRPLGYDSRPLGYDSRPLGYDSRPLGYDSRPLGYDSRPLGYDSRPLGYDSRPLGYDSRPLGYDSRPLGYDSRPLGYDSRPLGYDSRPLGYDSRPLGYDSRPLGYDSRPLGYDSRPLGYDSRPLGYDSRPLGYDSRPLGYDSRPLGYDSRPLGYDSRPLGYDSRPLGYDSRPLGYDSRPLGYDSRPLGYDSRPLGYDSRPLGYDSRPLGYDSRPLGYDSRPLGYDSRPLGYDSRPLGYDSRPLGYDSRPLGYDSRPLGYDSRPLGYDSRPLGYDSRPLGYDSRPLGYDSRPLGYDSRPLGYDSRPLGYDSRPLGYDSRPLGYDSRPLGYDSRPLGYDSRPLGYDSRPLGYDSRPLGYDSRPLGYDSRPLGYDSRPLGYDSRPLGYDSRPLGYDSRPLGYDSRPLGYDSRPLGYDSRPLGYDSRPLGYDSRPLGYDSRPLGYDSRPLGYDSRPLGYDSRPLGYDSRPLGYDSRPLGYDSRPLGYDSRPLGYDSRPLGYDSRPLGYDSRPLGYDSRPLGYDSRPLGYDSRPLGYDSRPLGYDSRPLGYDSRPLGYDSRPLGYDSRPLGYDSRPLGYDSRPLGYDSRPLGYDSRPLGYDSRPLGYDSRPLGYDSRPLGYDSRPLGYDSRPLGYDSRPLGYDSRPLGYDSRPLGYDSRPLGYDSRPLGYDSRPLGYDSRPLGYDSRPLGYDSRPLGYDSRPLGYDSRPLGYDSRPLGYDSRPLGYDSRPLGYDSRPLGYDSRPLGYDSRPLGYDSRPLGYDSRPLGYDSRPLGYDSRPLGYDSRPLGYDSRPLGYDSRPLGYDSRPLGYDSRPLGYDSRPLGYDSRPLGYDSRPLGYDSRPLGYDSRPLGYDSRPLGYDSRPLGYDSRPLGYDSRPLGYDSRPLGYDSRPLGYDSRPLGYDSRPLGYDSRPLGYDSRPLGYDSRPLGYDSRPLGYDSRPLGYDSRPLGYDSRPLGYDSRPLGYDSRPLGYDSRPLGYDSRPLGYDSRPLGYDSRPLGYDSRPLGYDSRPLGYDSRPLGYDSRPLGYDSRPLGYDSRPLGYDSRPLGYDSRPLGYDSRPLGYDSRPLGYDSRPLGYDSRPLGYDSRPLGYDSRPLGYDSRPLGYDSRPLGYDSRPLGYDSRPLGYDSRPLGYDSRPLGYDSRPLGYDSRPLGYDSRPLGYDSRPLGYDSRPLGYDSRPLGYDSRPLGYDSRPLGYDSRPLGYDSRPLGYDSRPLGYDSRPLGYDSRPLGYDSRPLGYDSRPLGYDSRPLGYDSRPLGYDSRPLGYDSRPLGYDSRPLGYDSRPLGYDSRPLGYDSRPLGYDSRPLGYDSRPLGYDSRPLGYDSRPLGYDSRPLGYDSRPLGYDSRPLGYDSRPLGYDSRPLGYDSRPLGYDSRPLGYDSRPLGYDSRPLGYDSRPLGYDSRPLGYDSRPLGYDSRPLGYDSRPLGYDSRPLGYDSRPLGYDSRPLGYDSRPLGYDSRPLGYDSRPLGYDSRPLGYDSRPLGYDSRPLGYDSRPLGYDSRPLGYDSRPLGYDSRPLGYDSRPLGYDSRPLGYDS

SEQ ID NO: 6 - protein, 3500 aa, Artificial Sequence
  resilin-like polypeptide
  MISC_FEATURE (8)..(3500): May be present or absent in groups of the repeat unit Arg Pro Ala Gly Tyr Asp Ser
RPAGYDSRPAGYDSRPAGYDSRPAGYDSRPAGYDSRPAGYDSRPAGYDSRPAGYDSRPAGYDSRPAGYDSRPAGYDSRPAGYDSRPAGYDSRPAGYDSRPAGYDSRPAGYDSRPAGYDSRPAGYDSRPAGYDSRPAGYDSRPAGYDSRPAGYDSRPAGYDSRPAGYDSRPAGYDSRPAGYDSRPAGYDSRPAGYDSRPAGYDSRPAGYDSRPAGYDSRPAGYDSRPAGYDSRPAGYDSRPAGYDSRPAGYDSRPAGYDSRPAGYDSRPAGYDSRPAGYDSRPAGYDSRPAGYDSRPAGYDSRPAGYDSRPAGYDSRPAGYDSRPAGYDSRPAGYDSRPAGYDSRPAGYDSRPAGYDSRPAGYDSRPAGYDSRPAGYDSRPAGYDSRPAGYDSRPAGYDSRPAGYDSRPAGYDSRPAGYDSRPAGYDSRPAGYDSRPAGYDSRPAGYDSRPAGYDSRPAGYDSRPAGYDSRPAGYDSRPAGYDSRPAGYDSRPAGYDSRPAGYDSRPAGYDSRPAGYDSRPAGYDSRPAGYDSRPAGYDSRPAGYDSRPAGYDSRPAGYDSRPAGYDSRPAGYDSRPAGYDSRPAGYDSRPAGYDSRPAGYDSRPAGYDSRPAGYDSRPAGYDSRPAGYDSRPAGYDSRPAGYDSRPAGYDSRPAGYDSRPAGYDSRPAGYDSRPAGYDSRPAGYDSRPAGYDSRPAGYDSRPAGYDSRPAGYDSRPAGYDSRPAGYDSRPAGYDSRPAGYDSRPAGYDSRPAGYDSRPAGYDSRPAGYDSRPAGYDSRPAGYDSRPAGYDSRPAGYDSRPAGYDSRPAGYDSRPAGYDSRPAGYDSRPAGYDSRPAGYDSRPAGYDSRPAGYDSRPAGYDSRPAGYDSRPAGYDSRPAGYDSRPAGYDSRPAGYDSRPAGYDSRPAGYDSRPAGYDSRPAGYDSRPAGYDSRPAGYDSRPAGYDSRPAGYDSRPAGYDSRPAGYDSRPAGYDSRPAGYDSRPAGYDSRPAGYDSRPAGYDSRPAGYDSRPAGYDSRPAGYDSRPAGYDSRPAGYDSRPAGYDSRPAGYDSRPAGYDSRPAGYDSRPAGYDSRPAGYDSRPAGYDSRPAGYDSRPAGYDSRPAGYDSRPAGYDSRPAGYDSRPAGYDSRPAGYDSRPAGYDSRPAGYDSRPAGYDSRPAGYDSRPAGYDSRPAGYDSRPAGYDSRPAGYDSRPAGYDSRPAGYDSRPAGYDSRPAGYDSRPAGYDSRPAGYDSRPAGYDSRPAGYDSRPAGYDSRPAGYDSRPAGYDSRPAGYDSRPAGYDSRPAGYDSRPAGYDSRPAGYDSRPAGYDSRPAGYDSRPAGYDSRPAGYDSRPAGYDSRPAGYDSRPAGYDSRPAGYDSRPAGYDSRPAGYDSRPAGYDSRPAGYDSRPAGYDSRPAGYDSRPAGYDSRPAGYDSRPAGYDSRPAGYDSRPAGYDSRPAGYDSRPAGYDSRPAGYDSRPAGYDSRPAGYDSRPAGYDSRPAGYDSRPAGYDSRPAGYDSRPAGYDSRPAGYDSRPAGYDSRPAGYDSRPAGYDSRPAGYDSRPAGYDSRPAGYDSRPAGYDSRPAGYDSRPAGYDSRPAGYDSRPAGYDSRPAGYDSRPAGYDSRPAGYDSRPAGYDSRPAGYDSRPAGYDSRPAGYDSRPAGYDSRPAGYDSRPAGYDSRPAGYDSRPAGYDSRPAGYDSRPAGYDSRPAGYDSRPAGYDSRPAGYDSRPAGYDSRPAGYDSRPAGYDSRPAGYDSRPAGYDSRPAGYDSRPAGYDSRPAGYDSRPAGYDSRPAGYDSRPAGYDSRPAGYDSRPAGYDSRPAGYDSRPAGYDSRPAGYDSRPAGYDSRPAGYDSRPAGYDSRPAGYDSRPAGYDSRPAGYDSRPAGYDSRPAGYDSRPAGYDSRPAGYDSRPAGYDSRPAGYDSRPAGYDSRPAGYDSRPAGYDSRPAGYDSRPAGYDSRPAGYDSRPAGYDSRPAGYDSRPAGYDSRPAGYDSRPAGYDSRPAGYDSRPAGYDSRPAGYDSRPAGYDSRPAGYDSRPAGYDSRPAGYDSRPAGYDSRPAGYDSRPAGYDSRPAGYDSRPAGYDSRPAGYDSRPAGYDSRPAGYDSRPAGYDSRPAGYDSRPAGYDSRPAGYDSRPAGYDSRPAGYDSRPAGYDSRPAGYDSRPAGYDSRPAGYDSRPAGYDSRPAGYDSRPAGYDSRPAGYDSRPAGYDSRPAGYDSRPAGYDSRPAGYDSRPAGYDSRPAGYDSRPAGYDSRPAGYDSRPAGYDSRPAGYDSRPAGYDSRPAGYDSRPAGYDSRPAGYDSRPAGYDSRPAGYDSRPAGYDSRPAGYDSRPAGYDSRPAGYDSRPAGYDSRPAGYDSRPAGYDSRPAGYDSRPAGYDSRPAGYDSRPAGYDSRPAGYDSRPAGYDSRPAGYDSRPAGYDSRPAGYDSRPAGYDSRPAGYDSRPAGYDSRPAGYDSRPAGYDSRPAGYDSRPAGYDSRPAGYDSRPAGYDSRPAGYDSRPAGYDSRPAGYDSRPAGYDSRPAGYDSRPAGYDSRPAGYDSRPAGYDSRPAGYDSRPAGYDSRPAGYDSRPAGYDSRPAGYDSRPAGYDSRPAGYDSRPAGYDSRPAGYDSRPAGYDSRPAGYDSRPAGYDSRPAGYDSRPAGYDSRPAGYDSRPAGYDSRPAGYDSRPAGYDSRPAGYDSRPAGYDSRPAGYDSRPAGYDSRPAGYDSRPAGYDSRPAGYDSRPAGYDSRPAGYDSRPAGYDSRPAGYDSRPAGYDSRPAGYDSRPAGYDSRPAGYDSRPAGYDSRPAGYDSRPAGYDSRPAGYDSRPAGYDSRPAGYDSRPAGYDSRPAGYDSRPAGYDSRPAGYDSRPAGYDSRPAGYDSRPAGYDSRPAGYDSRPAGYDSRPAGYDSRPAGYDSRPAGYDSRPAGYDSRPAGYDSRPAGYDSRPAGYDSRPAGYDSRPAGYDSRPAGYDSRPAGYDSRPAGYDSRPAGYDSRPAGYDSRPAGYDSRPAGYDSRPAGYDSRPAGYDSRPAGYDSRPAGYDSRPAGYDSRPAGYDSRPAGYDSRPAGYDSRPAGYDSRPAGYDSRPAGYDSRPAGYDSRPAGYDSRPAGYDSRPAGYDSRPAGYDSRPAGYDSRPAGYDSRPAGYDSRPAGYDSRPAGYDSRPAGYDSRPAGYDSRPAGYDSRPAGYDSRPAGYDSRPAGYDSRPAGYDSRPAGYDSRPAGYDSRPAGYDSRPAGYDSRPAGYDSRPAGYDSRPAGYDSRPAGYDSRPAGYDSRPAGYDSRPAGYDSRPAGYDSRPAGYDSRPAGYDSRPAGYDSRPAGYDSRPAGYDSRPAGYDSRPAGYDSRPAGYDSRPAGYDSRPAGYDSRPAGYDSRPAGYDSRPAGYDSRPAGYDSRPAGYDSRPAGYDSRPAGYDSRPAGYDSRPAGYDSRPAGYDSRPAGYDSRPAGYDSRPAGYDSRPAGYDSRPAGYDSRPAGYDSRPAGYDSRPAGYDSRPAGYDSRPAGYDSRPAGYDSRPAGYDSRPAGYDSRPAGYDSRPAGYDS

SEQ ID NO: 7 - protein, 3500 aa, Artificial Sequence
  resilin-like polypeptide
  MISC_FEATURE (8)..(3500): May be present or absent in groups of the repeat unit Gly Arg Gly Asp Ser Tyr Pro
GRGDSYPGRGDSYPGRGDSYPGRGDSYPGRGDSYPGRGDSYPGRGDSYPGRGDSYPGRGDSYPGRGDSYPGRGDSYPGRGDSYPGRGDSYPGRGDSYPGRGDSYPGRGDSYPGRGDSYPGRGDSYPGRGDSYPGRGDSYPGRGDSYPGRGDSYPGRGDSYPGRGDSYPGRGDSYPGRGDSYPGRGDSYPGRGDSYPGRGDSYPGRGDSYPGRGDSYPGRGDSYPGRGDSYPGRGDSYPGRGDSYPGRGDSYPGRGDSYPGRGDSYPGRGDSYPGRGDSYPGRGDSYPGRGDSYPGRGDSYPGRGDSYPGRGDSYPGRGDSYPGRGDSYPGRGDSYPGRGDSYPGRGDSYPGRGDSYPGRGDSYPGRGDSYPGRGDSYPGRGDSYPGRGDSYPGRGDSYPGRGDSYPGRGDSYPGRGDSYPGRGDSYPGRGDSYPGRGDSYPGRGDSYPGRGDSYPGRGDSYPGRGDSYPGRGDSYPGRGDSYPGRGDSYPGRGDSYPGRGDSYPGRGDSYPGRGDSYPGRGDSYPGRGDSYPGRGDSYPGRGDSYPGRGDSYPGRGDSYPGRGDSYPGRGDSYPGRGDSYPGRGDSYPGRGDSYPGRGDSYPGRGDSYPGRGDSYPGRGDSYPGRGDSYPGRGDSYPGRGDSYPGRGDSYPGRGDSYPGRGDSYPGRGDSYPGRGDSYPGRGDSYPGRGDSYPGRGDSYPGRGDSYPGRGDSYPGRGDSYPGRGDSYPGRGDSYPGRGDSYPGRGDSYPGRGDSYPGRGDSYPGRGDSYPGRGDSYPGRGDSYPGRGDSYPGRGDSYPGRGDSYPGRGDSYPGRGDSYPGRGDSYPGRGDSYPGRGDSYPGRGDSYPGRGDSYPGRGDSYPGRGDSYPGRGDSYPGRGDSYPGRGDSYPGRGDSYPGRGDSYPGRGDSYPGRGDSYPGRGDSYPGRGDSYPGRGDSYPGRGDSYPGRGDSYPGRGDSYPGRGDSYPGRGDSYPGRGDSYPGRGDSYPGRGDSYPGRGDSYPGRGDSYPGRGDSYPGRGDSYPGRGDSYPGRGDSYPGRGDSYPGRGDSYPGRGDSYPGRGDSYPGRGDSYPGRGDSYPGRGDSYPGRGDSYPGRGDSYPGRGDSYPGRGDSYPGRGDSYPGRGDSYPGRGDSYPGRGDSYPGRGDSYPGRGDSYPGRGDSYPGRGDSYPGRGDSYPGRGDSYPGRGDSYPGRGDSYPGRGDSYPGRGDSYPGRGDSYPGRGDSYPGRGDSYPGRGDSYPGRGDSYPGRGDSYPGRGDSYPGRGDSYPGRGDSYPGRGDSYPGRGDSYPGRGDSYPGRGDSYPGRGDSYPGRGDSYPGRGDSYPGRGDSYPGRGDSYPGRGDSYPGRGDSYPGRGDSYPGRGDSYPGRGDSYPGRGDSYPGRGDSYPGRGDSYPGRGDSYPGRGDSYPGRGDSYPGRGDSYPGRGDSYPGRGDSYPGRGDSYPGRGDSYPGRGDSYPGRGDSYPGRGDSYPGRGDSYPGRGDSYPGRGDSYPGRGDSYPGRGDSYPGRGDSYPGRGDSYPGRGDSYPGRGDSYPGRGDSYPGRGDSYPGRGDSYPGRGDSYPGRGDSYPGRGDSYPGRGDSYPGRGDSYPGRGDSYPGRGDSYPGRGDSYPGRGDSYPGRGDSYPGRGDSYPGRGDSYPGRGDSYPGRGDSYPGRGDSYPGRGDSYPGRGDSYPGRGDSYPGRGDSYPGRGDSYPGRGDSYPGRGDSYPGRGDSYPGRGDSYPGRGDSYPGRGDSYPGRGDSYPGRGDSYPGRGDSYPGRGDSYPGRGDSYPGRGDSYPGRGDSYPGRGDSYPGRGDSYPGRGDSYPGRGDSYPGRGDSYPGRGDSYPGRGDSYPGRGDSYPGRGDSYPGRGDSYPGRGDSYPGRGDSYPGRGDSYPGRGDSYPGRGDSYPGRGDSYPGRGDSYPGRGDSYPGRGDSYPGRGDSYPGRGDSYPGRGDSYPGRGDSYPGRGDSYPGRGDSYPGRGDSYPGRGDSYPGRGDSYPGRGDSYPGRGDSYPGRGDSYPGRGDSYPGRGDSYPGRGDSYPGRGDSYPGRGDSYPGRGDSYPGRGDSYPGRGDSYPGRGDSYPGRGDSYPGRGDSYPGRGDSYPGRGDSYPGRGDSYPGRGDSYPGRGDSYPGRGDSYPGRGDSYPGRGDSYPGRGDSYPGRGDSYPGRGDSYPGRGDSYPGRGDSYPGRGDSYPGRGDSYPGRGDSYPGRGDSYPGRGDSYPGRGDSYPGRGDSYPGRGDSYPGRGDSYPGRGDSYPGRGDSYPGRGDSYPGRGDSYPGRGDSYPGRGDSYPGRGDSYPGRGDSYPGRGDSYPGRGDSYPGRGDSYPGRGDSYPGRGDSYPGRGDSYPGRGDSYPGRGDSYPGRGDSYPGRGDSYPGRGDSYPGRGDSYPGRGDSYPGRGDSYPGRGDSYPGRGDSYPGRGDSYPGRGDSYPGRGDSYPGRGDSYPGRGDSYPGRGDSYPGRGDSYPGRGDSYPGRGDSYPGRGDSYPGRGDSYPGRGDSYPGRGDSYPGRGDSYPGRGDSYPGRGDSYPGRGDSYPGRGDSYPGRGDSYPGRGDSYPGRGDSYPGRGDSYPGRGDSYPGRGDSYPGRGDSYPGRGDSYPGRGDSYPGRGDSYPGRGDSYPGRGDSYPGRGDSYPGRGDSYPGRGDSYPGRGDSYPGRGDSYPGRGDSYPGRGDSYPGRGDSYPGRGDSYPGRGDSYPGRGDSYPGRGDSYPGRGDSYPGRGDSYPGRGDSYPGRGDSYPGRGDSYPGRGDSYPGRGDSYPGRGDSYPGRGDSYPGRGDSYPGRGDSYPGRGDSYPGRGDSYPGRGDSYPGRGDSYPGRGDSYPGRGDSYPGRGDSYPGRGDSYPGRGDSYPGRGDSYPGRGDSYPGRGDSYPGRGDSYPGRGDSYPGRGDSYPGRGDSYPGRGDSYPGRGDSYPGRGDSYPGRGDSYPGRGDSYPGRGDSYPGRGDSYPGRGDSYPGRGDSYPGRGDSYPGRGDSYPGRGDSYPGRGDSYPGRGDSYPGRGDSYPGRGDSYPGRGDSYPGRGDSYPGRGDSYPGRGDSYPGRGDSYPGRGDSYPGRGDSYPGRGDSYPGRGDSYPGRGDSYPGRGDSYPGRGDSYPGRGDSYPGRGDSYPGRGDSYPGRGDSYPGRGDSYPGRGDSYPGRGDSYPGRGDSYPGRGDSYPGRGDSYPGRGDSYPGRGDSYPGRGDSYPGRGDSYPGRGDSYPGRGDSYPGRGDSYPGRGDSYPGRGDSYPGRGDSYPGRGDSYPGRGDSYPGRGDSYPGRGDSYPGRGDSYPGRGDSYPGRGDSYPGRGDSYPGRGDSYPGRGDSYPGRGDSYPGRGDSYPGRGDSYPGRGDSYPGRGDSYPGRGDSYPGRGDSYPGRGDSYPGRGDSYPGRGDSYPGRGDSYPGRGDSYPGRGDSYPGRGDSYPGRGDSYPGRGDSYPGRGDSYPGRGDSYPGRGDSYPGRGDSYPGRGDSYPGRGDSYPGRGDSYPGRGDSYPGRGDSYPGRGDSYPGRGDSYPGRGDSYPGRGDSYPGRGDSYP

SEQ ID NO: 8 - protein, 4000 aa, Artificial Sequence
  resilin-like polypeptide
  MISC_FEATURE (9)..(4000): May be present or absent in groups of the repeat unit Gly Arg Gly Asp Ser Pro Tyr Gln
GRGDSPYQGRGDSPYQGRGDSPYQGRGDSPYQGRGDSPYQGRGDSPYQGRGDSPYQGRGDSPYQGRGDSPYQGRGDSPYQGRGDSPYQGRGDSPYQGRGDSPYQGRGDSPYQGRGDSPYQGRGDSPYQGRGDSPYQGRGDSPYQGRGDSPYQGRGDSPYQGRGDSPYQGRGDSPYQGRGDSPYQGRGDSPYQGRGDSPYQGRGDSPYQGRGDSPYQGRGDSPYQGRGDSPYQGRGDSPYQGRGDSPYQGRGDSPYQGRGDSPYQGRGDSPYQGRGDSPYQGRGDSPYQGRGDSPYQGRGDSPYQGRGDSPYQGRGDSPYQGRGDSPYQGRGDSPYQGRGDSPYQGRGDSPYQGRGDSPYQGRGDSPYQGRGDSPYQGRGDSPYQGRGDSPYQGRGDSPYQGRGDSPYQGRGDSPYQGRGDSPYQGRGDSPYQGRGDSPYQGRGDSPYQGRGDSPYQGRGDSPYQGRGDSPYQGRGDSPYQGRGDSPYQGRGDSPYQGRGDSPYQGRGDSPYQGRGDSPYQGRGDSPYQGRGDSPYQGRGDSPYQGRGDSPYQGRGDSPYQGRGDSPYQGRGDSPYQGRGDSPYQGRGDSPYQGRGDSPYQGRGDSPYQGRGDSPYQGRGDSPYQGRGDSPYQGRGDSPYQGRGDSPYQGRGDSPYQGRGDSPYQGRGDSPYQGRGDSPYQGRGDSPYQGRGDSPYQGRGDSPYQGRGDSPYQGRGDSPYQGRGDSPYQGRGDSPYQGRGDSPYQGRGDSPYQGRGDSPYQGRGDSPYQGRGDSPYQGRGDSPYQGRGDSPYQGRGDSPYQGRGDSPYQGRGDSPYQGRGDSPYQGRGDSPYQGRGDSPYQGRGDSPYQGRGDSPYQGRGDSPYQGRGDSPYQGRGDSPYQGRGDSPYQGRGDSPYQGRGDSPYQGRGDSPYQGRGDSPYQGRGDSPYQGRGDSPYQGRGDSPYQGRGDSPYQGRGDSPYQGRGDSPYQGRGDSPYQGRGDSPYQGRGDSPYQGRGDSPYQGRGDSPYQGRGDSPYQGRGDSPYQGRGDSPYQGRGDSPYQGRGDSPYQGRGDSPYQGRGDSPYQGRGDSPYQGRGDSPYQGRGDSPYQGRGDSPYQGRGDSPYQGRGDSPYQGRGDSPYQGRGDSPYQGRGDSPYQGRGDSPYQGRGDSPYQGRGDSPYQGRGDSPYQGRGDSPYQGRGDSPYQGRGDSPYQGRGDSPYQGRGDSPYQGRGDSPYQGRGDSPYQGRGDSPYQGRGDSPYQGRGDSPYQGRGDSPYQGRGDSPYQGRGDSPYQGRGDSPYQGRGDSPYQGRGDSPYQGRGDSPYQGRGDSPYQGRGDSPYQGRGDSPYQGRGDSPYQGRGDSPYQGRGDSPYQGRGDSPYQGRGDSPYQGRGDSPYQGRGDSPYQGRGDSPYQGRGDSPYQGRGDSPYQGRGDSPYQGRGDSPYQGRGDSPYQGRGDSPYQGRGDSPYQGRGDSPYQGRGDSPYQGRGDSPYQGRGDSPYQGRGDSPYQGRGDSPYQGRGDSPYQGRGDSPYQGRGDSPYQGRGDSPYQGRGDSPYQGRGDSPYQGRGDSPYQGRGDSPYQGRGDSPYQGRGDSPYQGRGDSPYQGRGDSPYQGRGDSPYQGRGDSPYQGRGDSPYQGRGDSPYQGRGDSPYQGRGDSPYQGRGDSPYQGRGDSPYQGRGDSPYQGRGDSPYQGRGDSPYQGRGDSPYQGRGDSPYQGRGDSPYQGRGDSPYQGRGDSPYQGRGDSPYQGRGDSPYQGRGDSPYQGRGDSPYQGRGDSPYQGRGDSPYQGRGDSPYQGRGDSPYQGRGDSPYQGRGDSPYQGRGDSPYQGRGDSPYQGRGDSPYQGRGDSPYQGRGDSPYQGRGDSPYQGRGDSPYQGRGDSPYQGRGDSPYQGRGDSPYQGRGDSPYQGRGDSPYQGRGDSPYQGRGDSPYQGRGDSPYQGRGDSPYQGRGDSPYQGRGDSPYQGRGDSPYQGRGDSPYQGRGDSPYQGRGDSPYQGRGDSPYQGRGDSPYQGRGDSPYQGRGDSPYQGRGDSPYQGRGDSPYQGRGDSPYQGRGDSPYQGRGDSPYQGRGDSPYQGRGDSPYQGRGDSPYQGRGDSPYQGRGDSPYQGRGDSPYQGRGDSPYQGRGDSPYQGRGDSPYQGRGDSPYQGRGDSPYQGRGDSPYQGRGDSPYQGRGDSPYQGRGDSPYQGRGDSPYQGRGDSPYQGRGDSPYQGRGDSPYQGRGDSPYQGRGDSPYQGRGDSPYQGRGDSPYQGRGDSPYQGRGDSPYQGRGDSPYQGRGDSPYQGRGDSPYQGRGDSPYQGRGDSPYQGRGDSPYQGRGDSPYQGRGDSPYQGRGDSPYQGRGDSPYQGRGDSPYQGRGDSPYQGRGDSPYQGRGDSPYQGRGDSPYQGRGDSPYQGRGDSPYQGRGDSPYQGRGDSPYQGRGDSPYQGRGDSPYQGRGDSPYQGRGDSPYQGRGDSPYQGRGDSPYQGRGDSPYQGRGDSPYQGRGDSPYQGRGDSPYQGRGDSPYQGRGDSPYQGRGDSPYQGRGDSPYQGRGDSPYQGRGDSPYQGRGDSPYQGRGDSPYQGRGDSPYQGRGDSPYQGRGDSPYQGRGDSPYQGRGDSPYQGRGDSPYQGRGDSPYQGRGDSPYQGRGDSPYQGRGDSPYQGRGDSPYQGRGDSPYQGRGDSPYQGRGDSPYQGRGDSPYQGRGDSPYQGRGDSPYQGRGDSPYQGRGDSPYQGRGDSPYQGRGDSPYQGRGDSPYQGRGDSPYQGRGDSPYQGRGDSPYQGRGDSPYQGRGDSPYQGRGDSPYQGRGDSPYQGRGDSPYQGRGDSPYQGRGDSPYQGRGDSPYQGRGDSPYQGRGDSPYQGRGDSPYQGRGDSPYQGRGDSPYQGRGDSPYQGRGDSPYQGRGDSPYQGRGDSPYQGRGDSPYQGRGDSPYQGRGDSPYQGRGDSPYQGRGDSPYQGRGDSPYQGRGDSPYQGRGDSPYQGRGDSPYQGRGDSPYQGRGDSPYQGRGDSPYQGRGDSPYQGRGDSPYQGRGDSPYQGRGDSPYQGRGDSPYQGRGDSPYQGRGDSPYQGRGDSPYQGRGDSPYQGRGDSPYQGRGDSPYQGRGDSPYQGRGDSPYQGRGDSPYQGRGDSPYQGRGDSPYQGRGDSPYQGRGDSPYQGRGDSPYQGRGDSPYQGRGDSPYQGRGDSPYQGRGDSPYQGRGDSPYQGRGDSPYQGRGDSPYQGRGDSPYQGRGDSPYQGRGDSPYQGRGDSPYQGRGDSPYQGRGDSPYQGRGDSPYQGRGDSPYQGRGDSPYQGRGDSPYQGRGDSPYQGRGDSPYQGRGDSPYQGRGDSPYQGRGDSPYQGRGDSPYQGRGDSPYQGRGDSPYQGRGDSPYQGRGDSPYQGRGDSPYQGRGDSPYQGRGDSPYQGRGDSPYQGRGDSPYQGRGDSPYQGRGDSPYQGRGDSPYQGRGDSPYQGRGDSPYQGRGDSPYQGRGDSPYQGRGDSPYQGRGDSPYQGRGDSPYQGRGDSPYQGRGDSPYQGRGDSPYQGRGDSPYQGRGDSPYQGRGDSPYQGRGDSPYQGRGDSPYQGRGDSPYQGRGDSPYQGRGDSPYQGRGDSPYQGRGDSPYQGRGDSPYQGRGDSPYQGRGDSPYQGRGDSPYQGRGDSPYQGRGDSPYQGRGDSPYQGRGDSPYQGRGDSPYQGRGDSPYQGRGDSPYQGRGDSPYQGRGDSPYQGRGDSPYQGRGDSPYQGRGDSPYQGRGDSPYQGRGDSPYQGRGDSPYQGRGDSPYQGRGDSPYQGRGDSPYQGRGDSPYQGRGDSPYQGRGDSPYQGRGDSPYQGRGDSPYQGRGDSPYQGRGDSPYQGRGDSPYQGRGDSPYQGRGDSPYQGRGDSPYQGRGDSPYQGRGDSPYQGRGDSPYQGRGDSPYQGRGDSPYQGRGDSPYQGRGDSPYQGRGDSPYQGRGDSPYQGRGDSPYQGRGDSPYQGRGDSPYQGRGDSPYQGRGDSPYQGRGDSPYQGRGDSPYQGRGDSPYQGRGDSPYQGRGDSPYQGRGDSPYQGRGDSPYQ

SEQ ID NO: 9 - protein, 4000 aa, Artificial Sequence
  resilin-like polypeptide
  MISC_FEATURE (9)..(4000): May be present or absent in groups of the repeat unit Gly Arg Gly Asn Ser Pro Tyr Gly
GRGNSPYGGRGNSPYGGRGNSPYGGRGNSPYGGRGNSPYGGRGNSPYGGRGNSPYGGRGNSPYGGRGNSPYGGRGNSPYGGRGNSPYGGRGNSPYGGRGNSPYGGRGNSPYGGRGNSPYGGRGNSPYGGRGNSPYGGRGNSPYGGRGNSPYGGRGNSPYGGRGNSPYGGRGNSPYGGRGNSPYGGRGNSPYGGRGNSPYGGRGNSPYGGRGNSPYGGRGNSPYGGRGNSPYGGRGNSPYGGRGNSPYGGRGNSPYGGRGNSPYGGRGNSPYGGRGNSPYGGRGNSPYGGRGNSPYGGRGNSPYGGRGNSPYGGRGNSPYGGRGNSPYGGRGNSPYGGRGNSPYGGRGNSPYGGRGNSPYGGRGNSPYGGRGNSPYGGRGNSPYGGRGNSPYGGRGNSPYGGRGNSPYGGRGNSPYGGRGNSPYGGRGNSPYGGRGNSPYGGRGNSPYGGRGNSPYGGRGNSPYGGRGNSPYGGRGNSPYGGRGNSPYGGRGNSPYGGRGNSPYGGRGNSPYGGRGNSPYGGRGNSPYGGRGNSPYGGRGNSPYGGRGNSPYGGRGNSPYGGRGNSPYGGRGNSPYGGRGNSPYGGRGNSPYGGRGNSPYGGRGNSPYGGRGNSPYGGRGNSPYGGRGNSPYGGRGNSPYGGRGNSPYGGRGNSPYGGRGNSPYGGRGNSPYGGRGNSPYGGRGNSPYGGRGNSPYGGRGNSPYGGRGNSPYGGRGNSPYGGRGNSPYGGRGNSPYGGRGNSPYGGRGNSPYGGRGNSPYGGRGNSPYGGRGNSPYGGRGNSPYGGRGNSPYGGRGNSPYGGRGNSPYGGRGNSPYGGRGNSPYGGRGNSPYGGRGNSPYGGRGNSPYGGRGNSPYGGRGNSPYGGRGNSPYGGRGNSPYGGRGNSPYGGRGNSPYGGRGNSPYGGRGNSPYGGRGNSPYGGRGNSPYGGRGNSPYGGRGNSPYGGRGNSPYGGRGNSPYGGRGNSPYGGRGNSPYGGRGNSPYGGRGNSPYGGRGNSPYGGRGNSPYGGRGNSPYGGRGNSPYGGRGNSPYGGRGNSPYGGRGNSPYGGRGNSPYGGRGNSPYGGRGNSPYGGRGNSPYGGRGNSPYGGRGNSPYGGRGNSPYGGRGNSPYGGRGNSPYGGRGNSPYGGRGNSPYGGRGNSPYGGRGNSPYGGRGNSPYGGRGNSPYGGRGNSPYGGRGNSPYGGRGNSPYGGRGNSPYGGRGNSPYGGRGNSPYGGRGNSPYGGRGNSPYGGRGNSPYGGRGNSPYGGRGNSPYGGRGNSPYGGRGNSPYGGRGNSPYGGRGNSPYGGRGNSPYGGRGNSPYGGRGNSPYGGRGNSPYGGRGNSPYGGRGNSPYGGRGNSPYGGRGNSPYGGRGNSPYGGRGNSPYGGRGNSPYGGRGNSPYGGRGNSPYGGRGNSPYGGRGNSPYGGRGNSPYGGRGNSPYGGRGNSPYGGRGNSPYGGRGNSPYGGRGNSPYGGRGNSPYGGRGNSPYGGRGNSPYGGRGNSPYGGRGNSPYGGRGNSPYGGRGNSPYGGRGNSPYGGRGNSPYGGRGNSPYGGRGNSPYGGRGNSPYGGRGNSPYGGRGNSPYGGRGNSPYGGRGNSPYGGRGNSPYGGRGNSPYGGRGNSPYGGRGNSPYGGRGNSPYGGRGNSPYGGRGNSPYGGRGNSPYGGRGNSPYGGRGNSPYGGRGNSPYGGRGNSPYGGRGNSPYGGRGNSPYGGRGNSPYGGRGNSPYGGRGNSPYGGRGNSPYGGRGNSPYGGRGNSPYGGRGNSPYGGRGNSPYGGRGNSPYGGRGNSPYGGRGNSPYGGRGNSPYGGRGNSPYGGRGNSPYGGRGNSPYGGRGNSPYGGRGNSPYGGRGNSPYGGRGNSPYGGRGNSPYGGRGNSPYGGRGNSPYGGRGNSPYGGRGNSPYGGRGNSPYGGRGNSPYGGRGNSPYGGRGNSPYGGRGNSPYGGRGNSPYGGRGNSPYGGRGNSPYGGRGNSPYGGRGNSPYGGRGNSPYGGRGNSPYGGRGNSPYGGRGNSPYGGRGNSPYGGRGNSPYGGRGNSPYGGRGNSPYGGRGNSPYGGRGNSPYGGRGNSPYGGRGNSPYGGRGNSPYGGRGNSPYGGRGNSPYGGRGNSPYGGRGNSPYGGRGNSPYGGRGNSPYGGRGNSPYGGRGNSPYGGRGNSPYGGRGNSPYGGRGNSPYGGRGNSPYGGRGNSPYGGRGNSPYGGRGNSPYGGRGNSPYGGRGNSPYGGRGNSPYGGRGNSPYGGRGNSPYGGRGNSPYGGRGNSPYGGRGNSPYGGRGNSPYGGRGNSPYGGRGNSPYGGRGNSPYGGRGNSPYGGRGNSPYGGRGNSPYGGRGNSPYGGRGNSPYGGRGNSPYGGRGNSPYGGRGNSPYGGRGNSPYGGRGNSPYGGRGNSPYGGRGNSPYGGRGNSPYGGRGNSPYGGRGNSPYGGRGNSPYGGRGNSPYGGRGNSPYGGRGNSPYGGRGNSPYGGRGNSPYGGRGNSPYGGRGNSPYGGRGNSPYGGRGNSPYGGRGNSPYGGRGNSPYGGRGNSPYGGRGNSPYGGRGNSPYGGRGNSPYGGRGNSPYGGRGNSPYGGRGNSPYGGRGNSPYGGRGNSPYGGRGNSPYGGRGNSPYGGRGNSPYGGRGNSPYGGRGNSPYGGRGNSPYGGRGNSPYGGRGNSPYGGRGNSPYGGRGNSPYGGRGNSPYGGRGNSPYGGRGNSPYGGRGNSPYGGRGNSPYGGRGNSPYGGRGNSPYGGRGNSPYGGRGNSPYGGRGNSPYGGRGNSPYGGRGNSPYGGRGNSPYGGRGNSPYGGRGNSPYGGRGNSPYGGRGNSPYGGRGNSPYGGRGNSPYGGRGNSPYGGRGNSPYGGRGNSPYGGRGNSPYGGRGNSPYGGRGNSPYGGRGNSPYGGRGNSPYGGRGNSPYGGRGNSPYGGRGNSPYGGRGNSPYGGRGNSPYGGRGNSPYGGRGNSPYGGRGNSPYGGRGNSPYGGRGNSPYGGRGNSPYGGRGNSPYGGRGNSPYGGRGNSPYGGRGNSPYGGRGNSPYGGRGNSPYGGRGNSPYGGRGNSPYGGRGNSPYGGRGNSPYGGRGNSPYGGRGNSPYGGRGNSPYGGRGNSPYGGRGNSPYGGRGNSPYGGRGNSPYGGRGNSPYGGRGNSPYGGRGNSPYGGRGNSPYGGRGNSPYGGRGNSPYGGRGNSPYGGRGNSPYGGRGNSPYGGRGNSPYGGRGNSPYGGRGNSPYGGRGNSPYGGRGNSPYGGRGNSPYGGRGNSPYGGRGNSPYGGRGNSPYGGRGNSPYGGRGNSPYGGRGNSPYGGRGNSPYGGRGNSPYGGRGNSPYGGRGNSPYGGRGNSPYGGRGNSPYGGRGNSPYGGRGNSPYGGRGNSPYGGRGNSPYGGRGNSPYGGRGNSPYGGRGNSPYGGRGNSPYGGRGNSPYGGRGNSPYGGRGNSPYGGRGNSPYGGRGNSPYGGRGNSPYGGRGNSPYGGRGNSPYGGRGNSPYGGRGNSPYGGRGNSPYGGRGNSPYGGRGNSPYGGRGNSPYGGRGNSPYGGRGNSPYGGRGNSPYGGRGNSPYGGRGNSPYGGRGNSPYGGRGNSPYGGRGNSPYGGRGNSPYGGRGNSPYGGRGNSPYGGRGNSPYGGRGNSPYGGRGNSPYGGRGNSPYGGRGNSPYGGRGNSPYGGRGNSPYGGRGNSPYGGRGNSPYGGRGNSPYGGRGNSPYGGRGNSPYGGRGNSPYGGRGNSPYGGRGNSPYGGRGNSPYGGRGNSPYGGRGNSPYGGRGNSPYGGRGNSPYGGRGNSPYGGRGNSPYGGRGNSPYGGRGNSPYGGRGNSPYGGRGNSPYGGRGNSPYGGRGNSPYGGRGNSPYGGRGNSPYGGRGNSPYGGRGNSPYGGRGNSPYGGRGNSPYGGRGNSPYGGRGNSPYGGRGNSPYGGRGNSPYGGRGNSPYGGRGNSPYGGRGNSPYGGRGNSPYGGRGNSPYGGRGNSPYGGRGNSPYGGRGNSPYGGRGNSPYGGRGNSPYGGRGNSPYGGRGNSPYGGRGNSPYGGRGNSPYGGRGNSPYG

SEQ ID NO: 10 - protein, 2500 aa, Artificial Sequence
  elastin-like polypeptide
  MISC_FEATURE (4)..(4): Xaa can be any naturally occurring amino acid
  MISC_FEATURE (6)..(2500): May be present or absent in groups of the repeat unit Val Pro Gly Xaa Gly
  MISC_FEATURE (9)..(9): Xaa can be any naturally occurring amino acid
  MISC_FEATURE (14)..(14): Xaa can be any naturally occurring amino acid
  MISC_FEATURE (19)..(19): Xaa can be any naturally occurring amino acid
  MISC_FEATURE (24)..(24): Xaa can be any naturally occurring amino acid
  MISC_FEATURE (29)..(29): Xaa can be any naturally occurring amino acid
  MISC_FEATURE (34)..(34): Xaa can be any naturally occurring amino acid
  MISC_FEATURE (39)..(39): Xaa can be any naturally occurring amino acid
  MISC_FEATURE (44)..(44): Xaa can be any naturally occurring amino acid
  MISC_FEATURE (49)..(49): Xaa can be any naturally occurring amino acid
  MISC_FEATURE (54)..(54): Xaa can be any naturally occurring amino acid
  MISC_FEATURE (59)..(59): Xaa can be any naturally occurring amino acid
  MISC_FEATURE (64)..(64): Xaa can be any naturally occurring amino acid
  MISC_FEATURE (69)..(69): Xaa can be any naturally occurring amino acid
  MISC_FEATURE (74)..(74): Xaa can be any naturally occurring amino acid
  MISC_FEATURE (79)..(79): Xaa can be any naturally occurring amino acid
  MISC_FEATURE (84)..(84): Xaa can be any naturally occurring amino acid
  MISC_FEATURE (89)..(89): Xaa can be any naturally occurring amino acid
  MISC_FEATURE (94)..(94): Xaa can be any naturally occurring amino acid
  MISC_FEATURE (99)..(99): Xaa can be any naturally occurring amino acid
  MISC_FEATURE (104)..(104): Xaa can be any naturally occurring amino acid
  MISC_FEATURE (109)..(109): Xaa can be any naturally occurring amino acid
  MISC_FEATURE (114)..(114): Xaa can be any naturally occurring amino acid
  MISC_FEATURE (119)..(119): Xaa can be any naturally occurring amino acid
  MISC_FEATURE (124)..(124): Xaa can be any naturally occurring amino acid
  MISC_FEATURE (129)..(129): Xaa can be any naturally occurring amino acid
  MISC_FEATURE (134)..(134): Xaa can be any naturally occurring amino acid
  MISC_FEATURE (139)..(139): Xaa can be any naturally occurring amino acid
  MISC_FEATURE (144)..(144): Xaa can be any naturally occurring amino acid
  MISC_FEATURE (149)..(149): Xaa can be any naturally occurring amino acid
  MISC_FEATURE (154)..(154): Xaa can be any naturally occurring amino acid
  MISC_FEATURE (159)..(159): Xaa can be any naturally occurring amino acid
  MISC_FEATURE (164)..(164): Xaa can be any naturally occurring amino acid
  MISC_FEATURE (169)..(169): Xaa can be any naturally occurring amino acid
  MISC_FEATURE (174)..(174): Xaa can be any naturally occurring amino acid
  MISC_FEATURE (179)..(179): Xaa can be any naturally occurring amino acid
  MISC_FEATURE (184)..(184): Xaa can be any naturally occurring amino acid
  MISC_FEATURE (189)..(189): Xaa can be any naturally occurring amino acid
  MISC_FEATURE (194)..(194): Xaa can be any naturally occurring amino acid
  MISC_FEATURE (199)..(199): Xaa can be any naturally occurring amino acid
  MISC_FEATURE (204)..(204): Xaa can be any naturally occurring amino acid
  MISC_FEATURE (209)..(209): Xaa can be any naturally occurring amino acid
  MISC_FEATURE (214)..(214): Xaa can be any naturally occurring amino acid
  MISC_FEATURE (219)..(219): Xaa can be any naturally occurring amino acid
  MISC_FEATURE (224)..(224): Xaa can be any naturally occurring amino acid
  MISC_FEATURE (229)..(229): Xaa can be any naturally occurring amino acid
  MISC_FEATURE (234)..(234): Xaa can be any naturally occurring amino acid
  MISC_FEATURE (239)..(239): Xaa can be any naturally occurring amino acid
  MISC_FEATURE (244)..(244): Xaa can be any naturally occurring amino acid
  MISC_FEATURE (249)..(249): Xaa can be any naturally occurring amino acid
  MISC_FEATURE (254)..(254): Xaa can be any naturally occurring amino acid
  MISC_FEATURE (259)..(259): Xaa can be any naturally occurring amino acid
  MISC_FEATURE (264)..(264): Xaa can be any naturally occurring amino acid
  MISC_FEATURE (269)..(269): Xaa can be any naturally occurring amino acid
  MISC_FEATURE (274)..(274): Xaa can be any naturally occurring amino acid
  MISC_FEATURE (279)..(279): Xaa can be any naturally occurring amino acid
  MISC_FEATURE (284)..(284): Xaa can be any naturally occurring amino acid
  MISC_FEATURE (289)..(289): Xaa can be any naturally occurring amino acid
  MISC_FEATURE (294)..(294): Xaa can be any naturally occurring amino acid
  MISC_FEATURE (299)..(299): Xaa can be any naturally occurring amino acid
  MISC_FEATURE (304)..(304): Xaa can be any naturally occurring amino acid
  MISC_FEATURE (309)..(309): Xaa can be any naturally occurring amino acid
  MISC_FEATURE (314)..(314): Xaa can be any naturally occurring amino acid
  MISC_FEATURE (319)..(319): Xaa can be any naturally occurring amino acid
  MISC_FEATURE (324)..(324): Xaa can be any naturally occurring amino acid
  MISC_FEATURE (329)..(329): Xaa can be any naturally occurring amino acid
  MISC_FEATURE (334)..(334): Xaa can be any naturally occurring amino acid
  MISC_FEATURE (339)..(339): Xaa can be any naturally occurring amino acid
  MISC_FEATURE (344)..(344): Xaa can be any naturally occurring amino acid
  MISC_FEATURE (349)..(349): Xaa can be any naturally occurring amino acid
  MISC_FEATURE (354)..(354): Xaa can be any naturally occurring amino acid
  MISC_FEATURE (359)..(359): Xaa can be any naturally occurring amino acid
  MISC_FEATURE (364)..(364): Xaa can be any naturally occurring amino acid
  MISC_FEATURE (369)..(369): Xaa can be any naturally occurring amino acid
  MISC_FEATURE (374)..(374): Xaa can be any naturally occurring amino acid
  MISC_FEATURE (379)..(379): Xaa can be any naturally occurring amino acid
  MISC_FEATURE (384)..(384): Xaa can be any naturally occurring amino acid
  MISC_FEATURE (389)..(389): Xaa can be any naturally occurring amino acid
  MISC_FEATURE (394)..(394): Xaa can be any naturally occurring amino acid
  MISC_FEATURE (399)..(399): Xaa can be any naturally occurring amino acid
  MISC_FEATURE (404)..(404): Xaa can be any naturally occurring amino acid
  MISC_FEATURE (409)..(409): Xaa can be any naturally occurring amino acid
  MISC_FEATURE (414)..(414): Xaa can be any naturally occurring amino acid
  MISC_FEATURE (419)..(419): Xaa can be any naturally occurring amino acid
  MISC_FEATURE (424)..(424): Xaa can be any naturally occurring amino acid
  MISC_FEATURE (429)..(429): Xaa can be any naturally occurring amino acid
  MISC_FEATURE (434)..(434): Xaa can be any naturally occurring amino acid
  MISC_FEATURE (439)..(439): Xaa can be any naturally occurring amino acid
  MISC_FEATURE (444)..(444): Xaa can be any naturally occurring amino acid
  MISC_FEATURE (449)..(449): Xaa can be any naturally occurring amino acid
  MISC_FEATURE (454)..(454): Xaa can be any naturally occurring amino acid
  MISC_FEATURE (459)..(459): Xaa can be any naturally occurring amino acid
  MISC_FEATURE (464)..(464): Xaa can be any naturally occurring amino acid
  MISC_FEATURE (469)..(469): Xaa can be any naturally occurring amino acid
  MISC_FEATURE (474)..(474): Xaa can be any naturally occurring amino acid
  MISC_FEATURE (479)..(479): Xaa can be any naturally occurring amino acid
  MISC_FEATURE (484)..(484): Xaa can be any naturally occurring amino acid
  MISC_FEATURE (489)..(489): Xaa can be any naturally occurring amino acid
  MISC_FEATURE (494)..(494): Xaa can be any naturally occurring amino acid
  MISC_FEATURE (499)..(499): Xaa can be any naturally occurring amino acid
  MISC_FEATURE (504)..(504): Xaa can be any naturally occurring amino acid
  MISC_FEATURE (509)..(509): Xaa can be any naturally occurring amino acid
  MISC_FEATURE (514)..(514): Xaa can be any naturally occurring amino acid
  MISC_FEATURE (519)..(519): Xaa can be any naturally occurring amino acid
  MISC_FEATURE (524)..(524): Xaa can be any naturally occurring amino acid
  MISC_FEATURE (529)..(529): Xaa can be any naturally occurring amino acid
  MISC_FEATURE (534)..(534): Xaa can be any naturally occurring amino acid
  MISC_FEATURE (539)..(539): Xaa can be any naturally occurring amino acid
  MISC_FEATURE (544)..(544): Xaa can be any naturally occurring amino acid
  MISC_FEATURE (549)..(549): Xaa can be any naturally occurring amino acid
  MISC_FEATURE (554)..(554): Xaa can be any naturally occurring amino acid
  MISC_FEATURE (559)..(559): Xaa can be any naturally occurring amino acid
  MISC_FEATURE (564)..(564): Xaa can be any naturally occurring amino acid
  MISC_FEATURE (569)..(569): Xaa can be any naturally occurring amino acid
  MISC_FEATURE (574)..(574): Xaa can be any naturally occurring amino acid
  MISC_FEATURE (579)..(579): Xaa can be any naturally occurring amino acid
  MISC_FEATURE (584)..(584): Xaa can be any naturally occurring amino acid
  MISC_FEATURE (589)..(589): Xaa can be any naturally occurring amino acid
  MISC_FEATURE (594)..(594): Xaa can be any naturally occurring amino acid
  MISC_FEATURE (599)..(599): Xaa can be any naturally occurring amino acid
  MISC_FEATURE (604)..(604): Xaa can be any naturally occurring amino acid
  MISC_FEATURE (609)..(609): Xaa can be any naturally occurring amino acid
  MISC_FEATURE (614)..(614): Xaa can be any naturally occurring amino acid
  MISC_FEATURE (619)..(619): Xaa can be any naturally occurring amino acid
  MISC_FEATURE (624)..(624): Xaa can be any naturally occurring amino acid
  MISC_FEATURE (629)..(629): Xaa can be any naturally occurring amino acid
  MISC_FEATURE (634)..(634): Xaa can be any naturally occurring amino acid
  MISC_FEATURE (639)..(639): Xaa can be any naturally occurring amino acid
  MISC_FEATURE (644)..(644): Xaa can be any naturally occurring amino acid
  MISC_FEATURE (649)..(649): Xaa can be any naturally occurring amino acid
  MISC_FEATURE (654)..(654): Xaa can be any naturally occurring amino acid
  MISC_FEATURE (659)..(659): Xaa can be any naturally occurring amino acid
  MISC_FEATURE (664)..(664): Xaa can be any naturally occurring amino acid
  MISC_FEATURE (669)..(669): Xaa can be any naturally occurring amino acid
  MISC_FEATURE (674)..(674): Xaa can be any naturally occurring amino acid
  MISC_FEATURE (679)..(679): Xaa can be any naturally occurring amino acid
  MISC_FEATURE (684)..(684): Xaa can be any naturally occurring amino acid
  MISC_FEATURE (689)..(689): Xaa can be any naturally occurring amino acid
  MISC_FEATURE (694)..(694): Xaa can be any naturally occurring amino acid
  MISC_FEATURE (699)..(699): Xaa can be any naturally occurring amino acid
  MISC_FEATURE (704)..(704): Xaa can be any naturally occurring amino acid
  MISC_FEATURE (709)..(709): Xaa can be any naturally occurring amino acid
  MISC_FEATURE (714)..(714): Xaa can be any naturally occurring amino acid
  MISC_FEATURE (719)..(719): Xaa can be any naturally occurring amino acid
  MISC_FEATURE (724)..(724): Xaa can be any naturally occurring amino acid
  MISC_FEATURE (729)..(729): Xaa can be any naturally occurring amino acid
  MISC_FEATURE (734)..(734): Xaa can be any naturally occurring amino acid
  MISC_FEATURE (739)..(739): Xaa can be any naturally occurring amino acid
  MISC_FEATURE (744)..(744): Xaa can be any naturally occurring amino acid
  MISC_FEATURE (749)..(749): Xaa can be any naturally occurring amino acid
  MISC_FEATURE (754)..(754): Xaa can be any naturally occurring amino acid
  MISC_FEATURE (759)..(759): Xaa can be any naturally occurring amino acid
  MISC_FEATURE (764)..(764): Xaa can be any naturally occurring amino acid
  MISC_FEATURE (769)..(769): Xaa can be any naturally occurring amino acid
  MISC_FEATURE (774)..(774): Xaa can be any naturally occurring amino acid
  MISC_FEATURE (779)..(779): Xaa can be any naturally occurring amino acid
  MISC_FEATURE (784)..(784): Xaa can be any naturally occurring amino acid
  MISC_FEATURE (789)..(789): Xaa can be any naturally occurring amino acid
  MISC_FEATURE (794)..(794): Xaa can be any naturally occurring amino acid
  MISC_FEATURE (799)..(799): Xaa can be any naturally occurring amino acid
  MISC_FEATURE (804)..(804): Xaa can be any naturally occurring amino acid
  MISC_FEATURE (809)..(809): Xaa can be any naturally occurring amino acid
  MISC_FEATURE (814)..(814): Xaa can be any naturally occurring amino acid
  MISC_FEATURE (819)..(819): Xaa can be any naturally occurring amino acid
  MISC_FEATURE (824)..(824): Xaa can be any naturally occurring amino acid
  MISC_FEATURE (829)..(829): Xaa can be any naturally occurring amino acid
  MISC_FEATURE (834)..(834): Xaa can be any naturally occurring amino acid
  MISC_FEATURE (839)..(839): Xaa can be any naturally occurring amino acid
  MISC_FEATURE (844)..(844): Xaa can be any naturally occurring amino acid
  MISC_FEATURE (849)..(849): Xaa can be any naturally occurring amino acid
  MISC_FEATURE (854)..(854): Xaa can be any naturally occurring amino acid
  MISC_FEATURE (859)..(859): Xaa can be any naturally occurring amino acid
  MISC_FEATURE (864)..(864): Xaa can be any naturally occurring amino acid
  MISC_FEATURE (869)..(869): Xaa can be any naturally occurring amino acid
  MISC_FEATURE (874)..(874): Xaa can be any naturally occurring amino acid
  MISC_FEATURE (879)..(879): Xaa can be any naturally occurring amino acid
  MISC_FEATURE (884)..(884): Xaa can be any naturally occurring amino acid
  MISC_FEATURE (889)..(889): Xaa can be any naturally occurring amino acid
  MISC_FEATURE (894)..(894): Xaa can be any naturally occurring amino acid
  MISC_FEATURE (899)..(899): Xaa can be any naturally occurring amino acid
  MISC_FEATURE (904)..(904): Xaa can be any naturally occurring amino acid
  MISC_FEATURE (909)..(909): Xaa can be any naturally occurring amino acid
  MISC_FEATURE (914)..(914): Xaa can be any naturally occurring amino acid
  MISC_FEATURE (919)..(919): Xaa can be any naturally occurring amino acid
  MISC_FEATURE (924)..(924): Xaa can be any naturally occurring amino acid
  MISC_FEATURE (929)..(929): Xaa can be any naturally occurring amino acid
  MISC_FEATURE (934)..(934): Xaa can be any naturally occurring amino acid
  MISC_FEATURE (939)..(939): Xaa can be any naturally occurring amino acid
  MISC_FEATURE (944)..(944): Xaa can be any naturally occurring amino acid
  MISC_FEATURE (949)..(949): Xaa can be any naturally occurring amino acid
  MISC_FEATURE (954)..(954): Xaa can be any naturally occurring amino acid
  MISC_FEATURE (959)..(959): Xaa can be any naturally occurring amino acid
  MISC_FEATURE (964)..(964): Xaa can be any naturally occurring amino acid
  MISC_FEATURE (969)..(969): Xaa can be any naturally occurring amino acid
  MISC_FEATURE (974)..(974): Xaa can be any naturally occurring amino acid
  MISC_FEATURE (979)..(979): Xaa can be any naturally occurring amino acid
  MISC_FEATURE (984)..(984): Xaa can be any naturally occurring amino acid
  MISC_FEATURE (989)..(989): Xaa can be any naturally occurring amino acid
  MISC_FEATURE (994)..(994): Xaa can be any naturally occurring amino acid
  MISC_FEATURE (999)..(999): Xaa can be any naturally occurring amino acid
  MISC_FEATURE (1004)..(1004): Xaa can be any naturally occurring amino acid
  MISC_FEATURE (1009)..(1009): Xaa can be any naturally occurring amino acid
  MISC_FEATURE (1014)..(1014): Xaa can be any naturally occurring amino acid
  MISC_FEATURE (1019)..(1019): Xaa can be any naturally occurring amino acid
  MISC_FEATURE (1024)..(1024): Xaa can be any naturally occurring amino acid
  MISC_FEATURE (1029)..(1029): Xaa can be any naturally occurring amino acid
  MISC_FEATURE (1034)..(1034): Xaa can be any naturally occurring amino acid
  MISC_FEATURE (1039)..(1039): Xaa can be any naturally occurring amino acid
  MISC_FEATURE (1044)..(1044): Xaa can be any naturally occurring amino acid
  MISC_FEATURE (1049)..(1049): Xaa can be any naturally occurring amino acid
  MISC_FEATURE (1054)..(1054): Xaa can be any naturally occurring amino acid
  MISC_FEATURE (1059)..(1059): Xaa can be any naturally occurring amino acid
  MISC_FEATURE (1064)..(1064): Xaa can be any naturally occurring amino acid
  MISC_FEATURE (1069)..(1069): Xaa can be any naturally occurring amino acid
  MISC_FEATURE (1074)..(1074): Xaa can be any naturally occurring amino acid
  MISC_FEATURE (1079)..(1079): Xaa can be any naturally occurring amino acid
  MISC_FEATURE (1084)..(1084): Xaa can be any naturally occurring amino acid
  MISC_FEATURE (1089)..(1089): Xaa can be any naturally occurring amino acid
  MISC_FEATURE (1094)..(1094): Xaa can be any naturally occurring amino acid
  MISC_FEATURE (1099)..(1099): Xaa can be any naturally occurring amino acid
  MISC_FEATURE (1104)..(1104): Xaa can be any naturally occurring amino acid
  MISC_FEATURE (1109)..(1109): Xaa can be any naturally occurring amino acid
  MISC_FEATURE (1114)..(1114): Xaa can be any naturally occurring amino acid
  MISC_FEATURE (1119)..(1119): Xaa can be any naturally occurring amino acid
  MISC_FEATURE (1124)..(1124): Xaa can be any naturally occurring amino acid
  MISC_FEATURE (1129)..(1129): Xaa can be any naturally occurring amino acid
  MISC_FEATURE (1134)..(1134): Xaa can be any naturally occurring amino acid
  MISC_FEATURE (1139)..(1139): Xaa can be any naturally occurring amino acid
  MISC_FEATURE (1144)..(1144): Xaa can be any naturally occurring amino acid
  MISC_FEATURE (1149)..(1149): Xaa can be any naturally occurring amino acid
  MISC_FEATURE (1154)..(1154): Xaa can be any naturally occurring amino acid
  MISC_FEATURE (1159)..(1159): Xaa can be any naturally occurring amino acid
  MISC_FEATURE (1164)..(1164): Xaa can be any naturally occurring amino acid
  MISC_FEATURE (1169)..(1169): Xaa can be any naturally occurring amino acid
  MISC_FEATURE (1174)..(1174): Xaa can be any naturally occurring amino acid
  MISC_FEATURE (1179)..(1179): Xaa can be any naturally occurring amino acid
  MISC_FEATURE (1184)..(1184): Xaa can be any naturally occurring amino acid
  MISC_FEATURE (1189)..(1189): Xaa can be any naturally occurring amino acid
  MISC_FEATURE (1194)..(1194): Xaa can be any naturally occurring amino acid
  MISC_FEATURE (1199)..(1199): Xaa can be any naturally occurring amino acid
  MISC_FEATURE (1204)..(1204): Xaa can be any naturally occurring amino acid
  MISC_FEATURE (1209)..(1209): Xaa can be any naturally occurring amino acid
  MISC_FEATURE (1214)..(1214): Xaa can be any naturally occurring amino acid
  MISC_FEATURE (1219)..(1219): Xaa can be any naturally occurring amino acid
  MISC_FEATURE (1224)..(1224): Xaa can be any naturally occurring amino acid
  MISC_FEATURE (1229)..(1229): Xaa can be any naturally occurring amino acid
  MISC_FEATURE (1234)..(1234): Xaa can be any naturally occurring amino acid
  MISC_FEATURE (1239)..(1239): Xaa can be any naturally occurring amino acid
  MISC_FEATURE (1244)..(1244): Xaa can be any naturally occurring amino acid
  MISC_FEATURE (1249)..(1249): Xaa can be any naturally occurring amino acid
  MISC_FEATURE (1254)..(1254): Xaa can be any naturally occurring amino acid
  MISC_FEATURE (1259)..(1259): Xaa can be any naturally occurring amino acid
  MISC_FEATURE (1264)..(1264): Xaa can be any naturally occurring amino acid
  MISC_FEATURE (1269)..(1269): Xaa can be any naturally occurring amino acid
  MISC_FEATURE (1274)..(1274): Xaa can be any naturally occurring amino acid
  MISC_FEATURE (1279)..(1279): Xaa can be any naturally occurring amino acid
  MISC_FEATURE (1284)..(1284): Xaa can be any naturally occurring amino acid
  MISC_FEATURE (1289)..(1289): Xaa can be any naturally occurring amino acid
  MISC_FEATURE (1294)..(1294): Xaa can be any naturally occurring amino acid
  MISC_FEATURE (1299)..(1299): Xaa can be any naturally occurring amino acid
  MISC_FEATURE (1304)..(1304): Xaa can be any naturally occurring amino acid
  MISC_FEATURE (1309)..(1309): Xaa can be any naturally occurring amino acid
  MISC_FEATURE (1314)..(1314): Xaa can be any naturally occurring amino acid
  MISC_FEATURE (1319)..(1319): Xaa can be any naturally occurring amino acid
  MISC_FEATURE (1324)..(1324): Xaa can be any naturally occurring amino acid
  MISC_FEATURE (1329)..(1329): Xaa can be any naturally occurring amino acid
  MISC_FEATURE (1334)..(1334): Xaa can be any naturally occurring amino acid
  MISC_FEATURE (1339)..(1339): Xaa can be any naturally occurring amino acid
  MISC_FEATURE (1344)..(1344): Xaa can be any naturally occurring amino acid
  MISC_FEATURE (1349)..(1349): Xaa can be any naturally occurring amino acid
  MISC_FEATURE (1354)..(1354): Xaa can be any naturally occurring amino acid
  MISC_FEATURE (1359)..(1359): Xaa can be any naturally occurring amino acid
  MISC_FEATURE (1364)..(1364): Xaa can be any naturally occurring amino acid
  MISC_FEATURE (1369)..(1369): Xaa can be any naturally occurring amino acid
  MISC_FEATURE (1374)..(1374): Xaa can be any naturally occurring amino acid
  MISC_FEATURE (1379)..(1379): Xaa can be any naturally occurring amino acid
  MISC_FEATURE (1384)..(1384): Xaa can be any naturally occurring amino acid
  MISC_FEATURE (1389)..(1389): Xaa can be any naturally occurring amino acid
  MISC_FEATURE (1394)..(1394): Xaa can be any naturally occurring amino acid
  MISC_FEATURE (1399)..(1399): Xaa can be any naturally occurring amino acid
  MISC_FEATURE (1404)..(1404): Xaa can be any naturally occurring amino acid
  MISC_FEATURE (1409)..(1409): Xaa can be any naturally occurring amino acid
  MISC_FEATURE (1414)..(1414): Xaa can be any naturally occurring amino acid
  MISC_FEATURE (1419)..(1419): Xaa can be any naturally occurring amino acid
  MISC_FEATURE (1424)..(1424): Xaa can be any naturally occurring amino acid
  MISC_FEATURE (1429)..(1429): Xaa can be any naturally occurring amino acid
  MISC_FEATURE (1434)..(1434): Xaa can be any naturally occurring amino acid
  MISC_FEATURE (1439)..(1439): Xaa can be any naturally occurring amino acid
  MISC_FEATURE (1444)..(1444): Xaa can be any naturally occurring amino acid
  MISC_FEATURE (1449)..(1449): Xaa can be any naturally occurring amino acid
  MISC_FEATURE (1454)..(1454): Xaa can be any naturally occurring amino acid
  MISC_FEATURE (1459)..(1459): Xaa can be any naturally occurring amino acid
  MISC_FEATURE (1464)..(1464): Xaa can be any naturally occurring amino acid
  MISC_FEATURE (1469)..(1469): Xaa can be any naturally occurring amino acid
  MISC_FEATURE (1474)..(1474): Xaa can be any naturally occurring amino acid
  MISC_FEATURE (1479)..(1479): Xaa can be any naturally occurring amino acid
  MISC_FEATURE (1484)..(1484): Xaa can be any naturally occurring amino acid
  MISC_FEATURE (1489)..(1489): Xaa can be any naturally occurring amino acid
  MISC_FEATURE (1494)..(1494): Xaa can be any naturally occurring amino acid
  MISC_FEATURE (1499)..(1499): Xaa can be any naturally occurring amino acid
  MISC_FEATURE (1504)..(1504): Xaa can be any naturally occurring amino acid
  MISC_FEATURE (1509)..(1509): Xaa can be any naturally occurring amino acid
  MISC_FEATURE (1514)..(1514): Xaa can be any naturally occurring amino acid
  MISC_FEATURE (1519)..(1519): Xaa can be any naturally occurring amino acid
  MISC_FEATURE (1524)..(1524): Xaa can be any naturally occurring amino acid
  MISC_FEATURE (1529)..(1529): Xaa can be any naturally occurring amino acid
  MISC_FEATURE (1534)..(1534): Xaa can be any naturally occurring amino acid
  MISC_FEATURE (1539)..(1539): Xaa can be any naturally occurring amino acid
  MISC_FEATURE (1544)..(1544): Xaa can be any naturally occurring amino acid
  MISC_FEATURE (1549)..(1549): Xaa can be any naturally occurring amino acid
  MISC_FEATURE (1554)..(1554): Xaa can be any naturally occurring amino acid
  MISC_FEATURE (1559)..(1559): Xaa can be any naturally occurring amino acid
  MISC_FEATURE (1564)..(1564): Xaa can be any naturally occurring amino acid
  MISC_FEATURE (1569)..(1569): Xaa can be any naturally occurring amino acid
  MISC_FEATURE (1574)..(1574): Xaa can be any naturally occurring amino acid
  MISC_FEATURE (1579)..(1579): Xaa can be any naturally occurring amino acid
  MISC_FEATURE (1584)..(1584): Xaa can be any naturally occurring amino acid
  MISC_FEATURE (1589)..(1589): Xaa can be any naturally occurring amino acid
  MISC_FEATURE (1594)..(1594): Xaa can be any naturally occurring amino acid
  MISC_FEATURE (1599)..(1599): Xaa can be any naturally occurring amino acid
  MISC_FEATURE (1604)..(1604): Xaa can be any naturally occurring amino acid
  MISC_FEATURE (1609)..(1609): Xaa can be any naturally occurring amino acid
  MISC_FEATURE (1614)..(1614): Xaa can be any naturally occurring amino acid
  MISC_FEATURE (1619)..(1619): Xaa can be any naturally occurring amino acid
  MISC_FEATURE (1624)..(1624): Xaa can be any naturally occurring amino acid
  MISC_FEATURE (1629)..(1629): Xaa can be any naturally occurring amino acid
  MISC_FEATURE (1634)..(1634): Xaa can be any naturally occurring amino acid
  MISC_FEATURE (1639)..(1639): Xaa can be any naturally occurring amino acid
  MISC_FEATURE (1644)..(1644): Xaa can be any naturally occurring amino acid
  MISC_FEATURE (1649)..(1649): Xaa can be any naturally occurring amino acid
  MISC_FEATURE (1654)..(1654): Xaa can be any naturally occurring amino acid
  MISC_FEATURE (1659)..(1659): Xaa can be any naturally occurring amino acid
  MISC_FEATURE (1664)..(1664): Xaa can be any naturally occurring amino acid
  MISC_FEATURE (1669)..(1669): Xaa can be any naturally occurring amino acid
  MISC_FEATURE (1674)..(1674): Xaa can be any naturally occurring amino acid
  MISC_FEATURE (1679)..(1679): Xaa can be any naturally occurring amino acid
  MISC_FEATURE (1684)..(1684): Xaa can be any naturally occurring amino acid
  MISC_FEATURE (1689)..(1689): Xaa can be any naturally occurring amino acid
  MISC_FEATURE (1694)..(1694): Xaa can be any naturally occurring amino acid
  MISC_FEATURE (1699)..(1699): Xaa can be any naturally occurring amino acid
  MISC_FEATURE (1704)..(1704): Xaa can be any naturally occurring amino acid
  MISC_FEATURE (1709)..(1709): Xaa can be any naturally occurring amino acid
  MISC_FEATURE (1714)..(1714): Xaa can be any naturally occurring amino acid
  MISC_FEATURE (1719)..(1719): Xaa can be any naturally occurring amino acid
  MISC_FEATURE (1724)..(1724): Xaa can be any naturally occurring amino acid
  MISC_FEATURE (1729)..(1729): Xaa can be any naturally occurring amino acid
  MISC_FEATURE (1734)..(1734): Xaa can be any naturally occurring amino acid
  MISC_FEATURE (1739)..(1739): Xaa can be any naturally occurring amino acid
  MISC_FEATURE (1744)..(1744): Xaa can be any naturally occurring amino acid
  MISC_FEATURE (1749)..(1749): Xaa can be any naturally occurring amino acid
  MISC_FEATURE (1754)..(1754): Xaa can be any naturally occurring amino acid
  MISC_FEATURE (1759)..(1759): Xaa can be any naturally occurring amino acid
  MISC_FEATURE (1764)..(1764): Xaa can be any naturally occurring amino acid
  MISC_FEATURE (1769)..(1769): Xaa can be any naturally occurring amino acid
  MISC_FEATURE (1774)..(1774): Xaa can be any naturally occurring amino acid
  MISC_FEATURE (1779)..(1779): Xaa can be any naturally occurring amino acid
  MISC_FEATURE (1784)..(1784): Xaa can be any naturally occurring amino acid
  MISC_FEATURE (1789)..(1789): Xaa can be any naturally occurring amino acid
  MISC_FEATURE (1794)..(1794): Xaa can be any naturally occurring amino acid
  MISC_FEATURE (1799)..(1799): Xaa can be any naturally occurring amino acid
  MISC_FEATURE (1804)..(1804): Xaa can be any naturally occurring amino acid
  MISC_FEATURE (1809)..(1809): Xaa can be any naturally occurring amino acid
  MISC_FEATURE (1814)..(1814): Xaa can be any naturally occurring amino acid
  MISC_FEATURE (1819)..(1819): Xaa can be any naturally occurring amino acid
  MISC_FEATURE (1824)..(1824): Xaa can be any naturally occurring amino acid
  MISC_FEATURE (1829)..(1829): Xaa can be any naturally occurring amino acid
  MISC_FEATURE (1834)..(1834): Xaa can be any naturally occurring amino acid
  MISC_FEATURE (1839)..(1839): Xaa can be any naturally occurring amino acid
  MISC_FEATURE (1844)..(1844): Xaa can be any naturally occurring amino acid
  MISC_FEATURE (1849)..(1849): Xaa can be any naturally occurring amino acid
  MISC_FEATURE (1854)..(1854): Xaa can be any naturally occurring amino acid
  MISC_FEATURE (1859)..(1859): Xaa can be any naturally occurring amino acid
  MISC_FEATURE (1864)..(1864): Xaa can be any naturally occurring amino acid
  MISC_FEATURE (1869)..(1869): Xaa can be any naturally occurring amino acid
  MISC_FEATURE (1874)..(1874): Xaa can be any naturally occurring amino acid
  MISC_FEATURE (1879)..(1879): Xaa can be any naturally occurring amino acid
  MISC_FEATURE (1884)..(1884): Xaa can be any naturally occurring amino acid
  MISC_FEATURE (1889)..(1889): Xaa can be any naturally occurring amino acid
  MISC_FEATURE (1894)..(1894): Xaa can be any naturally occurring amino acid
  MISC_FEATURE (1899)..(1899): Xaa can be any naturally occurring amino acid
  MISC_FEATURE (1904)..(1904): Xaa can be any naturally occurring amino acid
  MISC_FEATURE (1909)..(1909): Xaa can be any naturally occurring amino acid
  MISC_FEATURE (1914)..(1914): Xaa can be any naturally occurring amino acid
  MISC_FEATURE (1919)..(1919): Xaa can be any naturally occurring amino acid
  MISC_FEATURE (1924)..(1924): Xaa can be any naturally occurring amino acid
  MISC_FEATURE (1929)..(1929): Xaa can be any naturally occurring amino acid
  MISC_FEATURE (1934)..(1934): Xaa can be any naturally occurring amino acid
  MISC_FEATURE (1939)..(1939): Xaa can be any naturally occurring amino acid
  MISC_FEATURE (1944)..(1944): Xaa can be any naturally occurring amino acid
  MISC_FEATURE (1949)..(1949): Xaa can be any naturally occurring amino acid
  MISC_FEATURE (1954)..(1954): Xaa can be any naturally occurring amino acid
  MISC_FEATURE (1959)..(1959): Xaa can be any naturally occurring amino acid
  MISC_FEATURE (1964)..(1964): Xaa can be any naturally occurring amino acid
  MISC_FEATURE (1969)..(1969): Xaa can be any naturally occurring amino acid
  MISC_FEATURE (1974)..(1974): Xaa can be any naturally occurring amino acid
  MISC_FEATURE (1979)..(1979): Xaa can be any naturally occurring amino acid
  MISC_FEATURE (1984)..(1984): Xaa can be any naturally occurring amino acid
  MISC_FEATURE (1989)..(1989): Xaa can be any naturally occurring amino acid
  MISC_FEATURE (1994)..(1994): Xaa can be any naturally occurring amino acid
  MISC_FEATURE (1999)..(1999): Xaa can be any naturally occurring amino acid
  MISC_FEATURE (2004)..(2004): Xaa can be any naturally occurring amino acid
  MISC_FEATURE (2009)..(2009): Xaa can be any naturally occurring amino acid
  MISC_FEATURE (2014)..(2014): Xaa can be any naturally occurring amino acid
  MISC_FEATURE (2019)..(2019): Xaa can be any naturally occurring amino acid
  MISC_FEATURE (2024)..(2024): Xaa can be any naturally occurring amino acid
  MISC_FEATURE (2029)..(2029): Xaa can be any naturally occurring amino acid
  MISC_FEATURE (2034)..(2034): Xaa can be any naturally occurring amino acid
  MISC_FEATURE (2039)..(2039): Xaa can be any naturally occurring amino acid
  MISC_FEATURE (2044)..(2044): Xaa can be any naturally occurring amino acid
  MISC_FEATURE (2049)..(2049): Xaa can be any naturally occurring amino acid
  MISC_FEATURE (2054)..(2054): Xaa can be any naturally occurring amino acid
  MISC_FEATURE (2059)..(2059): Xaa can be any naturally occurring amino acid
  MISC_FEATURE (2064)..(2064): Xaa can be any naturally occurring amino acid
  MISC_FEATURE (2069)..(2069): Xaa can be any naturally occurring amino acid
  MISC_FEATURE (2074)..(2074): Xaa can be any naturally occurring amino acid
  MISC_FEATURE (2079)..(2079): Xaa can be any naturally occurring amino acid
  MISC_FEATURE (2084)..(2084): Xaa can be any naturally occurring amino acid
  MISC_FEATURE (2089)..(2089): Xaa can be any naturally occurring amino acid
  MISC_FEATURE (2094)..(2094): Xaa can be any naturally occurring amino acid
  MISC_FEATURE (2099)..(2099): Xaa can be any naturally occurring amino acid
  MISC_FEATURE (2104)..(2104): Xaa can be any naturally occurring amino acid
  MISC_FEATURE (2109)..(2109): Xaa can be any naturally occurring amino acid
  MISC_FEATURE (2114)..(2114): Xaa can be any naturally occurring amino acid
  MISC_FEATURE (2119)..(2119): Xaa can be any naturally occurring amino acid
  MISC_FEATURE (2124)..(2124): Xaa can be any naturally occurring amino acid
  MISC_FEATURE (2129)..(2129): Xaa can be any naturally occurring amino acid
  MISC_FEATURE (2134)..(2134): Xaa can be any naturally occurring amino acid
  MISC_FEATURE (2139)..(2139): Xaa can be any naturally occurring amino acid
  MISC_FEATURE (2144)..(2144): Xaa can be any naturally occurring amino acid
  MISC_FEATURE (2149)..(2149): Xaa can be any naturally occurring amino acid
  MISC_FEATURE (2154)..(2154): Xaa can be any naturally occurring amino acid
  MISC_FEATURE (2159)..(2159): Xaa can be any naturally occurring amino acid
  MISC_FEATURE (2164)..(2164): Xaa can be any naturally occurring amino acid
  MISC_FEATURE (2169)..(2169): Xaa can be any naturally occurring amino acid
  MISC_FEATURE (2174)..(2174): Xaa can be any naturally occurring amino acid
  MISC_FEATURE (2179)..(2179): Xaa can be any naturally occurring amino acid
  MISC_FEATURE (2184)..(2184): Xaa can be any naturally occurring amino acid
  MISC_FEATURE (2189)..(2189): Xaa can be any naturally occurring amino acid
  MISC_FEATURE (2194)..(2194): Xaa can be any naturally occurring amino acid
  MISC_FEATURE (2199)..(2199): Xaa can be any naturally occurring amino acid
  MISC_FEATURE (2204)..(2204): Xaa can be any naturally occurring amino acid
  MISC_FEATURE (2209)..(2209): Xaa can be any naturally occurring amino acid
  MISC_FEATURE (2214)..(2214): Xaa can be any naturally occurring amino acid
  MISC_FEATURE (2219)..(2219): Xaa can be any naturally occurring amino acid
  MISC_FEATURE (2224)..(2224): Xaa can be any naturally occurring amino acid
  MISC_FEATURE (2229)..(2229): Xaa can be any naturally occurring amino acid
  MISC_FEATURE (2234)..(2234): Xaa can be any naturally occurring amino acid
  MISC_FEATURE (2239)..(2239): Xaa can be any naturally occurring amino acid
  MISC_FEATURE (2244)..(2244): Xaa can be any naturally occurring amino acid
  MISC_FEATURE (2249)..(2249): Xaa can be any naturally occurring amino acid
  MISC_FEATURE (2254)..(2254): Xaa can be any naturally occurring amino acid
  MISC_FEATURE (2259)..(2259): Xaa can be any naturally occurring amino acid
  MISC_FEATURE (2264)..(2264): Xaa can be any naturally occurring amino acid
  MISC_FEATURE (2269)..(2269): Xaa can be any naturally occurring amino acid
  MISC_FEATURE (2274)..(2274): Xaa can be any naturally occurring amino acid
  MISC_FEATURE (2279)..(2279): Xaa can be any naturally occurring amino acid
  MISC_FEATURE (2284)..(2284): Xaa can be any naturally occurring amino acid
  MISC_FEATURE (2289)..(2289): Xaa can be any naturally occurring amino acid
  MISC_FEATURE (2294)..(2294): Xaa can be any naturally occurring amino acid
  MISC_FEATURE (2299)..(2299): Xaa can be any naturally occurring amino acid
  MISC_FEATURE (2304)..(2304): Xaa can be any naturally occurring amino acid
  MISC_FEATURE (2309)..(2309): Xaa can be any naturally occurring amino acid
  MISC_FEATURE (2314)..(2314): Xaa can be any naturally occurring amino acid
  MISC_FEATURE (2319)..(2319): Xaa can be any naturally occurring amino acid
  MISC_FEATURE (2324)..(2324): Xaa can be any naturally occurring amino acid
  MISC_FEATURE (2329)..(2329): Xaa can be any naturally occurring amino acid
  MISC_FEATURE (2334)..(2334): Xaa can be any naturally occurring amino acid
  MISC_FEATURE (2339)..(2339): Xaa can be any naturally occurring amino acid
  MISC_FEATURE (2344)..(2344): Xaa can be any naturally occurring amino acid
  MISC_FEATURE (2349)..(2349): Xaa can be any naturally occurring amino acid
  MISC_FEATURE (2354)..(2354): Xaa can be any naturally occurring amino acid
  MISC_FEATURE (2359)..(2359): Xaa can be any naturally occurring amino acid
  MISC_FEATURE (2364)..(2364): Xaa can be any naturally occurring amino acid
  MISC_FEATURE (2369)..(2369): Xaa can be any naturally occurring amino acid
  MISC_FEATURE (2374)..(2374): Xaa can be any naturally occurring amino acid
  MISC_FEATURE (2379)..(2379): Xaa can be any naturally occurring amino acid
  MISC_FEATURE (2384)..(2384): Xaa can be any naturally occurring amino acid
  MISC_FEATURE (2389)..(2389): Xaa can be any naturally occurring amino acid
  MISC_FEATURE (2394)..(2394): Xaa can be any naturally occurring amino acid
  MISC_FEATURE (2399)..(2399): Xaa can be any naturally occurring amino acid
  MISC_FEATURE (2404)..(2404): Xaa can be any naturally occurring amino acid
  MISC_FEATURE (2409)..(2409): Xaa can be any naturally occurring amino acid
  MISC_FEATURE (2414)..(2414): Xaa can be any naturally occurring amino acid
  MISC_FEATURE (2419)..(2419): Xaa can be any naturally occurring amino acid
  MISC_FEATURE (2424)..(2424): Xaa can be any naturally occurring amino acid
  MISC_FEATURE (2429)..(2429): Xaa can be any naturally occurring amino acid
  MISC_FEATURE (2434)..(2434): Xaa can be any naturally occurring amino acid
  MISC_FEATURE (2439)..(2439): Xaa can be any naturally occurring amino acid
  MISC_FEATURE (2444)..(2444): Xaa can be any naturally occurring amino acid
  MISC_FEATURE (2449)..(2449): Xaa can be any naturally occurring amino acid
  MISC_FEATURE (2454)..(2454): Xaa can be any naturally occurring amino acid
  MISC_FEATURE (2459)..(2459): Xaa can be any naturally occurring amino acid
  MISC_FEATURE (2464)..(2464): Xaa can be any naturally occurring amino acid
  MISC_FEATURE (2469)..(2469): Xaa can be any naturally occurring amino acid
  MISC_FEATURE (2474)..(2474): Xaa can be any naturally occurring amino acid
  MISC_FEATURE (2479)..(2479): Xaa can be any naturally occurring amino acid
  MISC_FEATURE (2484)..(2484): Xaa can be any naturally occurring amino acid
  MISC_FEATURE (2489)..(2489): Xaa can be any naturally occurring amino acid
  MISC_FEATURE (2494)..(2494): Xaa can be any naturally occurring amino acid
  MISC_FEATURE (2499)..(2499): Xaa can be any naturally occurring amino acid
VPGXGVPGXGVPGXGVPGXGVPGXGVPGXGVPGXGVPGXGVPGXGVPGXGVPGXGVPGXGVPGXGVPGXGVPGXGVPGXGVPGXGVPGXGVPGXGVPGXGVPGXGVPGXGVPGXGVPGXGVPGXGVPGXGVPGXGVPGXGVPGXGVPGXGVPGXGVPGXGVPGXGVPGXGVPGXGVPGXGVPGXGVPGXGVPGXGVPGXGVPGXGVPGXGVPGXGVPGXGVPGXGVPGXGVPGXGVPGXGVPGXGVPGXGVPGXGVPGXGVPGXGVPGXGVPGXGVPGXGVPGXGVPGXGVPGXGVPGXGVPGXGVPGXGVPGXGVPGXGVPGXGVPGXGVPGXGVPGXGVPGXGVPGXGVPGXGVPGXGVPGXGVPGXGVPGXGVPGXGVPGXGVPGXGVPGXGVPGXGVPGXGVPGXGVPGXGVPGXGVPGXGVPGXGVPGXGVPGXGVPGXGVPGXGVPGXGVPGXGVPGXGVPGXGVPGXGVPGXGVPGXGVPGXGVPGXGVPGXGVPGXGVPGXGVPGXGVPGXGVPGXGVPGXGVPGXGVPGXGVPGXGVPGXGVPGXGVPGXGVPGXGVPGXGVPGXGVPGXGVPGXGVPGXGVPGXGVPGXGVPGXGVPGXGVPGXGVPGXGVPGXGVPGXGVPGXGVPGXGVPGXGVPGXGVPGXGVPGXGVPGXGVPGXGVPGXGVPGXGVPGXGVPGXGVPGXGVPGXGVPGXGVPGXGVPGXGVPGXGVPGXGVPGXGVPGXGVPGXGVPGXGVPGXGVPGXGVPGXGVPGXGVPGXGVPGXGVPGXGVPGXGVPGXGVPGXGVPGXGVPGXGVPGXGVPGXGVPGXGVPGXGVPGXGVPGXGVPGXGVPGXGVPGXGVPGXGVPGXGVPGXGVPGXGVPGXGVPGXGVPGXGVPGXGVPGXGVPGXGVPGXGVPGXGVPGXGVPGXGVPGXGVPGXGVPGXGVPGXGVPGXGVPGXGVPGXGVPGXGVPGXGVPGXGVPGXGVPGXGVPGXGVPGXGVPGXGVPGXGVPGXGVPGXGVPGXGVPGXGVPGXGVPGXGVPGXGVPGXGVPGXGVPGXGVPGXGVPGXGVPGXGVPGXGVPGXGVPGXGVPGXGVPGXGVPGXGVPGXGVPGXGVPGXGVPGXGVPGXGVPGXGVPGXGVPGXGVPGXGVPGXGVPGXGVPGXGVPGXGVPGXGVPGXGVPGXGVPGXGVPGXGVPGXGVPGXGVPGXGVPGXGVPGXGVPGXGVPGXGVPGXGVPGXGVPGXGVPGXGVPGXGVPGXGVPGXGVPGXGVPGXGVPGXGVPGXGVPGXGVPGXGVPGXGVPGXGVPGXGVPGXGVPGXGVPGXGVPGXGVPGXGVPGXGVPGXGVPGXGVPGXGVPGXGVPGXGVPGXGVPGXGVPGXGVPGXGVPGXGVPGXGVPGXGVPGXGVPGXGVPGXGVPGXGVPGXGVPGXGVPGXGVPGXGVPGXGVPGXGVPGXGVPGXGVPGXGVPGXGVPGXGVPGXGVPGXGVPGXGVPGXGVPGXGVPGXGVPGXGVPGXGVPGXGVPGXGVPGXGVPGXGVPGXGVPGXGVPGXGVPGXGVPGXGVPGXGVPGXGVPGXGVPGXGVPGXGVPGXGVPGXGVPGXGVPGXGVPGXGVPGXGVPGXGVPGXGVPGXGVPGXGVPGXGVPGXGVPGXGVPGXGVPGXGVPGXGVPGXGVPGXGVPGXGVPGXGVPGXGVPGXGVPGXGVPGXGVPGXGVPGXGVPGXGVPGXGVPGXGVPGXGVPGXGVPGXGVPGXGVPGXGVPGXGVPGXGVPGXGVPGXGVPGXGVPGXGVPGXGVPGXGVPGXGVPGXGVPGXGVPGXGVPGXGVPGXGVPGXGVPGXGVPGXGVPGXGVPGXGVPGXGVPGXGVPGXGVPGXGVPGXGVPGXGVPGXGVPGXGVPGXGVPGXGVPGXGVPGXGVPGXGVPGXGVPGXGVPGXGVPGXGVPGXGVPGXGVPGXGVPGXGVPGXGVPGXGVPGXGVPGXGVPGXGVPGXGVPGXGVPGXGVPGXGVPGXGVPGXGVPGXGVPGXGVPGXGVPGXGVPGXGVPGXGVPGXGVPGXGVPGXGVPGXGVPGXGVPGXGVPGXGVPGXGVPGXGVPGXGVPGXGVPGXGVPGXGVPGXGVPGXGVPGXGVPGXGVPGXGVPGXGVPGXGVPGXGVPGXGVPGXGVPGXGVPGXGVPGXGVPGXGVPGXGVPGXGVPGXGVPGXGVPGXGVPGXGVPGXGVPGXGVPGXGVPGXGVPGXGVPGXGVPGXGVPGXGVPGXGVPGXGVPGXGVPGXGVPGXGVPGXGVPGXGVPGXGVPGXGVPGXGVPGXGVPGXGVPGXGVPGXGVPGXGVPGXGVPGXGVPGXGVPGXGVPGXGVPGXGVPGXGVPGXGVPGXGVPGXGVPGXGVPGXGVPGXGVPGXGVPGXGVPGXGVPGXGVPGXGVPGXGVPGXGVPGXGVPGXGVPGXGVPGXGVPGXGVPGXGVPGXGVPGXGVPGXGVPGXGVPGXGVPGXGVPGXGVPGXGVPGXGVPGXGVPGXGVPGXG

SEQ ID NO: 11 - protein, 2500 aa, Artificial Sequence
  elastin-like polypeptide
  MISC_FEATURE (6)..(2500): May be present or absent in groups of the repeat unit Gly Val Gly Val Pro
GVGVPGVGVPGVGVPGVGVPGVGVPGVGVPGVGVPGVGVPGVGVPGVGVPGVGVPGVGVPGVGVPGVGVPGVGVPGVGVPGVGVPGVGVPGVGVPGVGVPGVGVPGVGVPGVGVPGVGVPGVGVPGVGVPGVGVPGVGVPGVGVPGVGVPGVGVPGVGVPGVGVPGVGVPGVGVPGVGVPGVGVPGVGVPGVGVPGVGVPGVGVPGVGVPGVGVPGVGVPGVGVPGVGVPGVGVPGVGVPGVGVPGVGVPGVGVPGVGVPGVGVPGVGVPGVGVPGVGVPGVGVPGVGVPGVGVPGVGVPGVGVPGVGVPGVGVPGVGVPGVGVPGVGVPGVGVPGVGVPGVGVPGVGVPGVGVPGVGVPGVGVPGVGVPGVGVPGVGVPGVGVPGVGVPGVGVPGVGVPGVGVPGVGVPGVGVPGVGVPGVGVPGVGVPGVGVPGVGVPGVGVPGVGVPGVGVPGVGVPGVGVPGVGVPGVGVPGVGVPGVGVPGVGVPGVGVPGVGVPGVGVPGVGVPGVGVPGVGVPGVGVPGVGVPGVGVPGVGVPGVGVPGVGVPGVGVPGVGVPGVGVPGVGVPGVGVPGVGVPGVGVPGVGVPGVGVPGVGVPGVGVPGVGVPGVGVPGVGVPGVGVPGVGVPGVGVPGVGVPGVGVPGVGVPGVGVPGVGVPGVGVPGVGVPGVGVPGVGVPGVGVPGVGVPGVGVPGVGVPGVGVPGVGVPGVGVPGVGVPGVGVPGVGVPGVGVPGVGVPGVGVPGVGVPGVGVPGVGVPGVGVPGVGVPGVGVPGVGVPGVGVPGVGVPGVGVPGVGVPGVGVPGVGVPGVGVPGVGVPGVGVPGVGVPGVGVPGVGVPGVGVPGVGVPGVGVPGVGVPGVGVPGVGVPGVGVPGVGVPGVGVPGVGVPGVGVPGVGVPGVGVPGVGVPGVGVPGVGVPGVGVPGVGVPGVGVPGVGVPGVGVPGVGVPGVGVPGVGVPGVGVPGVGVPGVGVPGVGVPGVGVPGVGVPGVGVPGVGVPGVGVPGVGVPGVGVPGVGVPGVGVPGVGVPGVGVPGVGVPGVGVPGVGVPGVGVPGVGVPGVGVPGVGVPGVGVPGVGVPGVGVPGVGVPGVGVPGVGVPGVGVPGVGVPGVGVPGVGVPGVGVPGVGVPGVGVPGVGVPGVGVPGVGVPGVGVPGVGVPGVGVPGVGVPGVGVPGVGVPGVGVPGVGVPGVGVPGVGVPGVGVPGVGVPGVGVPGVGVPGVGVPGVGVPGVGVPGVGVPGVGVPGVGVPGVGVPGVGVPGVGVPGVGVPGVGVPGVGVPGVGVPGVGVPGVGVPGVGVPGVGVPGVGVPGVGVPGVGVPGVGVPGVGVPGVGVPGVGVPGVGVPGVGVPGVGVPGVGVPGVGVPGVGVPGVGVPGVGVPGVGVPGVGVPGVGVPGVGVPGVGVPGVGVPGVGVPGVGVPGVGVPGVGVPGVGVPGVGVPGVGVPGVGVPGVGVPGVGVPGVGVPGVGVPGVGVPGVGVPGVGVPGVGVPGVGVPGVGVPGVGVPGVGVPGVGVPGVGVPGVGVPGVGVPGVGVPGVGVPGVGVPGVGVPGVGVPGVGVPGVGVPGVGVPGVGVPGVGVPGVGVPGVGVPGVGVPGVGVPGVGVPGVGVPGVGVPGVGVPGVGVPGVGVPGVGVPGVGVPGVGVPGVGVPGVGVPGVGVPGVGVPGVGVPGVGVPGVGVPGVGVPGVGVPGVGVPGVGVPGVGVPGVGVPGVGVPGVGVPGVGVPGVGVPGVGVPGVGVPGVGVPGVGVPGVGVPGVGVPGVGVPGVGVPGVGVPGVGVPGVGVPGVGVPGVGVPGVGVPGVGVPGVGVPGVGVPGVGVPGVGVPGVGVPGVGVPGVGVPGVGVPGVGVPGVGVPGVGVPGVGVPGVGVPGVGVPGVGVPGVGVPGVGVPGVGVPGVGVPGVGVPGVGVPGVGVPGVGVPGVGVPGVGVPGVGVPGVGVPGVGVPGVGVPGVGVPGVGVPGVGVPGVGVPGVGVPGVGVPGVGVPGVGVPGVGVPGVGVPGVGVPGVGVPGVGVPGVGVPGVGVPGVGVPGVGVPGVGVPGVGVPGVGVPGVGVPGVGVPGVGVPGVGVPGVGVPGVGVPGVGVPGVGVPGVGVPGVGVPGVGVPGVGVPGVGVPGVGVPGVGVPGVGVPGVGVPGVGVPGVGVPGVGVPGVGVPGVGVPGVGVPGVGVPGVGVPGVGVPGVGVPGVGVPGVGVPGVGVPGVGVPGVGVPGVGVPGVGVPGVGVPGVGVPGVGVPGVGVPGVGVPGVGVPGVGVPGVGVPGVGVPGVGVPGVGVPGVGVPGVGVPGVGVPGVGVPGVGVPGVGVPGVGVPGVGVPGVGVPGVGVPGVGVPGVGVPGVGVPGVGVPGVGVPGVGVPGVGVPGVGVPGVGVPGVGVPGVGVPGVGVPGVGVPGVGVPGVGVPGVGVPGVGVPGVGVPGVGVPGVGVPGVGVPGVGVPGVGVPGVGVPGVGVPGVGVPGVGVPGVGVPGVGVPGVGVPGVGVPGVGVPGVGVPGVGVPGVGVP

SEQ ID NO: 12 - protein, 625 aa, Artificial Sequence
  elastin-like polypeptide
  MISC_FEATURE (101)..(625): May be present or absent in groups of the repeat unit Gly Val Gly Val Pro Gly Leu Gly Val Pro Gly Val Gly Val Pro Gly Leu Gly Val Pro Gly Val Gly Val Pro
GVGVPGLGVPGVGVPGLGVPGVGVPGVGVPGLGVPGVGVPGLGVPGVGVPGVGVPGLGVPGVGVPGLGVPGVGVPGVGVPGLGVPGVGVPGLGVPGVGVPGVGVPGLGVPGVGVPGLGVPGVGVPGVGVPGLGVPGVGVPGLGVPGVGVPGVGVPGLGVPGVGVPGLGVPGVGVPGVGVPGLGVPGVGVPGLGVPGVGVPGVGVPGLGVPGVGVPGLGVPGVGVPGVGVPGLGVPGVGVPGLGVPGVGVPGVGVPGLGVPGVGVPGLGVPGVGVPGVGVPGLGVPGVGVPGLGVPGVGVPGVGVPGLGVPGVGVPGLGVPGVGVPGVGVPGLGVPGVGVPGLGVPGVGVPGVGVPGLGVPGVGVPGLGVPGVGVPGVGVPGLGVPGVGVPGLGVPGVGVPGVGVPGLGVPGVGVPGLGVPGVGVPGVGVPGLGVPGVGVPGLGVPGVGVPGVGVPGLGVPGVGVPGLGVPGVGVPGVGVPGLGVPGVGVPGLGVPGVGVPGVGVPGLGVPGVGVPGLGVPGVGVPGVGVPGLGVPGVGVPGLGVPGVGVPGVGVPGLGVPGVGVPGLGVPGVGVPGVGVPGLGVPGVGVPGLGVPGVGVPGVGVPGLGVPGVGVPGLGVPGVGVP

SEQ ID NO: 13 - protein, 625 aa, Artificial Sequence
  elastin-like polypeptide
  MISC_FEATURE (101)..(625): May be present or absent in groups of the repeat unit Gly Val Gly Val Pro Gly Val Gly Val Pro Gly Ala Gly Val Pro Gly Val Gly Val Pro Gly Val Gly Val Pro
GVGVPGVGVPGAGVPGVGVPGVGVPGVGVPGVGVPGAGVPGVGVPGVGVPGVGVPGVGVPGAGVPGVGVPGVGVPGVGVPGVGVPGAGVPGVGVPGVGVPGVGVPGVGVPGAGVPGVGVPGVGVPGVGVPGVGVPGAGVPGVGVPGVGVPGVGVPGVGVPGAGVPGVGVPGVGVPGVGVPGVGVPGAGVPGVGVPGVGVPGVGVPGVGVPGAGVPGVGVPGVGVPGVGVPGVGVPGAGVPGVGVPGVGVPGVGVPGVGVPGAGVPGVGVPGVGVPGVGVPGVGVPGAGVPGVGVPGVGVPGVGVPGVGVPGAGVPGVGVPGVGVPGVGVPGVGVPGAGVPGVGVPGVGVPGVGVPGVGVPGAGVPGVGVPGVGVPGVGVPGVGVPGAGVPGVGVPGVGVPGVGVPGVGVPGAGVPGVGVPGVGVPGVGVPGVGVPGAGVPGVGVPGVGVPGVGVPGVGVPGAGVPGVGVPGVGVPGVGVPGVGVPGAGVPGVGVPGVGVPGVGVPGVGVPGAGVPGVGVPGVGVPGVGVPGVGVPGAGVPGVGVPGVGVPGVGVPGVGVPGAGVPGVGVPGVGVPGVGVPGVGVPGAGVPGVGVPGVGVPGVGVPGVGVPGAGVPGVGVPGVGVP

SEQ ID NO: 14 - protein, 625 aa, Artificial Sequence
  elastin-like polypeptide
  MISC_FEATURE (101)..(625): May be present or absent in groups of the repeat unit Gly Val Gly Val Pro Gly Trp Gly Val Pro Gly Val Gly Val Pro Gly Trp Gly Val Pro Gly Val Gly Val Pro
GVGVPGWGVPGVGVPGWGVPGVGVPGVGVPGWGVPGVGVPGWGVPGVGVPGVGVPGWGVPGVGVPGWGVPGVGVPGVGVPGWGVPGVGVPGWGVPGVGVPGVGVPGWGVPGVGVPGWGVPGVGVPGVGVPGWGVPGVGVPGWGVPGVGVPGVGVPGWGVPGVGVPGWGVPGVGVPGVGVPGWGVPGVGVPGWGVPGVGVPGVGVPGWGVPGVGVPGWGVPGVGVPGVGVPGWGVPGVGVPGWGVPGVGVPGVGVPGWGVPGVGVPGWGVPGVGVPGVGVPGWGVPGVGVPGWGVPGVGVPGVGVPGWGVPGVGVPGWGVPGVGVPGVGVPGWGVPGVGVPGWGVPGVGVPGVGVPGWGVPGVGVPGWGVPGVGVPGVGVPGWGVPGVGVPGWGVPGVGVPGVGVPGWGVPGVGVPGWGVPGVGVPGVGVPGWGVPGVGVPGWGVPGVGVPGVGVPGWGVPGVGVPGWGVPGVGVPGVGVPGWGVPGVGVPGWGVPGVGVPGVGVPGWGVPGVGVPGWGVPGVGVPGVGVPGWGVPGVGVPGWGVPGVGVPGVGVPGWGVPGVGVPGWGVPGVGVPGVGVPGWGVPGVGVPGWGVPGVGVPGVGVPGWGVPGVGVPGWGVPGVGVP

SEQ ID NO: 15 - protein, 1125 aa, Artificial Sequence
  elastin-like polypeptide
  MISC_FEATURE (181)..(1125): May be present or absent in groups of the repeat unit Gly Val Gly Val Pro Gly Val Gly Val Pro Gly Val Gly Val Pro Gly Val Gly Val Pro Gly Val Gly Val Pro Gly Val Gly Val Pro Gly Glu Gly Val Pro Gly Phe Gly Val Pro Gly Val Gly Val Pro
GVGVPGVGVPGVGVPGVGVPGVGVPGVGVPGEGVPGFGVPGVGVPGVGVPGVGVPGVGVPGVGVPGVGVPGVGVPGEGVPGFGVPGVGVPGVGVPGVGVPGVGVPGVGVPGVGVPGVGVPGEGVPGFGVPGVGVPGVGVPGVGVPGVGVPGVGVPGVGVPGVGVPGEGVPGFGVPGVGVPGVGVPGVGVPGVGVPGVGVPGVGVPGVGVPGEGVPGFGVPGVGVPGVGVPGVGVPGVGVPGVGVPGVGVPGVGVPGEGVPGFGVPGVGVPGVGVPGVGVPGVGVPGVGVPGVGVPGVGVPGEGVPGFGVPGVGVPGVGVPGVGVPGVGVPGVGVPGVGVPGVGVPGEGVPGFGVPGVGVPGVGVPGVGVPGVGVPGVGVPGVGVPGVGVPGEGVPGFGVPGVGVPGVGVPGVGVPGVGVPGVGVPGVGVPGVGVPGEGVPGFGVPGVGVPGVGVPGVGVPGVGVPGVGVPGVGVPGVGVPGEGVPGFGVPGVGVPGVGVPGVGVPGVGVPGVGVPGVGVPGVGVPGEGVPGFGVPGVGVPGVGVPGVGVPGVGVPGVGVPGVGVPGVGVPGEGVPGFGVPGVGVPGVGVPGVGVPGVGVPGVGVPGVGVPGVGVPGEGVPGFGVPGVGVPGVGVPGVGVPGVGVPGVGVPGVGVPGVGVPGEGVPGFGVPGVGVPGVGVPGVGVPGVGVPGVGVPGVGVPGVGVPGEGVPGFGVPGVGVPGVGVPGVGVPGVGVPGVGVPGVGVPGVGVPGEGVPGFGVPGVGVPGVGVPGVGVPGVGVPGVGVPGVGVPGVGVPGEGVPGFGVPGVGVPGVGVPGVGVPGVGVPGVGVPGVGVPGVGVPGEGVPGFGVPGVGVPGVGVPGVGVPGVGVPGVGVPGVGVPGVGVPGEGVPGFGVPGVGVPGVGVPGVGVPGVGVPGVGVPGVGVPGVGVPGEGVPGFGVPGVGVPGVGVPGVGVPGVGVPGVGVPGVGVPGVGVPGEGVPGFGVPGVGVPGVGVPGVGVPGVGVPGVGVPGVGVPGVGVPGEGVPGFGVPGVGVPGVGVPGVGVPGVGVPGVGVPGVGVPGVGVPGEGVPGFGVPGVGVPGVGVPGVGVPGVGVPGVGVPGVGVPGVGVPGEGVPGFGVPGVGVP

SEQ ID NO: 16 - protein, 1125 aa, Artificial Sequence
  elastin-like polypeptide
  MISC_FEATURE (181)..(1125): May be present or absent in groups of the repeat unit Gly Val Gly Val Pro Gly Val Gly Val Pro Gly Val Gly Val Pro Gly Val Gly Val Pro Gly Val Gly Val Pro Gly Val Gly Val Pro Gly Lys Gly Val Pro Gly Phe Gly Val Pro Gly Val Gly Val Pro
GVGVPGVGVPGVGVPGVGVPGVGVPGVGVPGKGVPGFGVPGVGVPGVGVPGVGVPGVGVPGVGVPGVGVPGVGVPGKGVPGFGVPGVGVPGVGVPGVGVPGVGVPGVGVPGVGVPGVGVPGKGVPGFGVPGVGVPGVGVPGVGVPGVGVPGVGVPGVGVPGVGVPGKGVPGFGVPGVGVPGVGVPGVGVPGVGVPGVGVPGVGVPGVGVPGKGVPGFGVPGVGVPGVGVPGVGVPGVGVPGVGVPGVGVPGVGVPGKGVPGFGVPGVGVPGVGVPGVGVPGVGVPGVGVPGVGVPGVGVPGKGVPGFGVPGVGVPGVGVPGVGVPGVGVPGVGVPGVGVPGVGVPGKGVPGFGVPGVGVPGVGVPGVGVPGVGVPGVGVPGVGVPGVGVPGKGVPGFGVPGVGVPGVGVPGVGVPGVGVPGVGVPGVGVPGVGVPGKGVPGFGVPGVGVPGVGVPGVGVPGVGVPGVGVPGVGVPGVGVPGKGVPGFGVPGVGVPGVGVPGVGVPGVGVPGVGVPGVGVPGVGVPGKGVPGFGVPGVGVPGVGVPGVGVPGVGVPGVGVPGVGVPGVGVPGKGVPGFGVPGVGVPGVGVPGVGVPGVGVPGVGVPGVGVPGVGVPGKGVPGFGVPGVGVPGVGVPGVGVPGVGVPGVGVPGVGVPGVGVPGKGVPGFGVPGVGVPGVGVPGVGVPGVGVPGVGVPGVGVPGVGVPGKGVPGFGVPGVGVPGVGVPGVGVPGVGVPGVGVPGVGVPGVGVPGKGVPGFGVPGVGVPGVGVPGVGVPGVGVPGVGVPGVGVPGVGVPGKGVPGFGVPGVGVPGVGVPGVGVPGVGVPGVGVPGVGVPGVGVPGKGVPGFGVPGVGVPGVGVPGVGVPGVGVPGVGVPGVGVPGVGVPGKGVPGFGVPGVGVPGVGVPGVGVPGVGVPGVGVPGVGVPGVGVPGKGVPGFGVPGVGVPGVGVPGVGVPGVGVPGVGVPGVGVPGVGVPGKGVPGFGVPGVGVPGVGVPGVGVPGVGVPGVGVPGVGVPGVGVPGKGVPGFGVPGVGVPGVGVPGVGVPGVGVPGVGVPGVGVPGVGVPGKGVPGFGVPGVGVPGVGVPGVGVPGVGVPGVGVPGVGVPGVGVPGKGVPGFGVPGVGVP

SEQ ID NO: 17 - protein, 625 aa, Artificial Sequence
  elastin-like polypeptide
  MISC_FEATURE (26)..(625): May be present or absent in groups of the repeat unit Gly Ala Gly Val Pro Gly Val Gly Val Pro Gly Ala Gly Val Pro Gly Val Gly Val Pro Gly Ala Gly Val Pro
GAGVPGVGVPGAGVPGVGVPGAGVPGAGVPGVGVPGAGVPGVGVPGAGVPGAGVPGVGVPGAGVPGVGVPGAGVPGAGVPGVGVPGAGVPGVGVPGAGVPGAGVPGVGVPGAGVPGVGVPGAGVPGAGVPGVGVPGAGVPGVGVPGAGVPGAGVPGVGVPGAGVPGVGVPGAGVPGAGVPGVGVPGAGVPGVGVPGAGVPGAGVPGVGVPGAGVPGVGVPGAGVPGAGVPGVGVPGAGVPGVGVPGAGVPGAGVPGVGVPGAGVPGVGVPGAGVPGAGVPGVGVPGAGVPGVGVPGAGVPGAGVPGVGVPGAGVPGVGVPGAGVPGAGVPGVGVPGAGVPGVGVPGAGVPGAGVPGVGVPGAGVPGVGVPGAGVPGAGVPGVGVPGAGVPGVGVPGAGVPGAGVPGVGVPGAGVPGVGVPGAGVPGAGVPGVGVPGAGVPGVGVPGAGVPGAGVPGVGVPGAGVPGVGVPGAGVPGAGVPGVGVPGAGVPGVGVPGAGVPGAGVPGVGVPGAGVPGVGVPGAGVPGAGVPGVGVPGAGVPGVGVPGAGVPGAGVPGVGVPGAGVPGVGVPGAGVPGAGVPGVGVPGAGVPGVGVPGAGVPGAGVPGVGVPGAGVPGVGVPGAGVP

SEQ ID NO: 18 - protein, 100 aa, Artificial Sequence
  Linker peptide
  MISC_FEATURE (6)..(100): May be present or absent in groups of the repeat unit Glu Ala Ala Ala Lys
EAAAKEAAAKEAAAKEAAAKEAAAKEAAAKEAAAKEAAAKEAAAKEAAAKEAAAKEAAAKEAAAKEAAAKEAAAKEAAAKEAAAKEAAAKEAAAKEAAAK

SEQ ID NO: 19 - protein, 150 aa, Artificial Sequence
  Linker peptide
  MISC_FEATURE (6)..(150): May be present or absent in groups of the repeat unit Gly Gly Gly Gly Ser
GGGGSGGGGSGGGGSGGGGSGGGGSGGGGSGGGGSGGGGSGGGGSGGGGSGGGGSGGGGSGGGGSGGGGSGGGGSGGGGSGGGGSGGGGSGGGGSGGGGSGGGGSGGGGSGGGGSGGGGSGGGGSGGGGSGGGGSGGGGSGGGGSGGGGS

SEQ ID NO: 20 - protein, 200 aa, Artificial Sequence
  Linker peptide
  MISC_FEATURE (5)..(100): May be present or absent in groups of the repeat unit Ser Gly Gly Gly
SGGGSGGGSGGGSGGGSGGGSGGGSGGGSGGGSGGGSGGGSGGGSGGGSGGGSGGGSGGGSGGGSGGGSGGGSGGGSGGGSGGGSGGGSGGGSGGGSGGGSGGGSGGGSGGGSGGGSGGGSGGGSGGGSGGGSGGGSGGGSGGGSGGGSGGGSGGGSGGGSGGGSGGGSGGGSGGGSGGGSGGGSGGGSGGGSGGGSGGG

SEQ ID NO: 21 - protein, 80 aa, Artificial Sequence
  Linker peptide
  MISC_FEATURE (6)..(100): May be present or absent in groups of the repeat unit Gly Gly Gly Ser
GGGSGGGSGGGSGGGSGGGSGGGSGGGSGGGSGGGSGGGSGGGSGGGSGGGSGGGSGGGSGGGSGGGSGGGSGGGSGGGS

SEQ ID NO: 22 - protein, 18 aa, Artificial Sequence
  Linker peptide
KESGSVSSEQLAQFRSLD

SEQ ID NO: 23 - protein, 14 aa, Artificial Sequence
  Linker peptide
EGKSSGSGSESKST

SEQ ID NO: 24 - protein, 58 aa, Artificial Sequence [sequence omitted]

SEQ ID NO: 25 - protein, 59 aa, Artificial Sequence
  Capture domain
VDNKFNKEQQNAFYEILSLPNLNEEQRAAFIQSLKDDPSQSANLLAEAKKLNDAQAPKG

SEQ ID NO: 26 - protein, 59 aa, Artificial Sequence
  Capture domain
VDNKFNKEHQNAFYEILHLPNLNEEQRNAFIQSLKHDPSQSANLLAEAKKLNDAQAPKG

SEQ ID NO: 27 - protein, 254 aa, Artificial Sequence
  Capture domain
AQHDEAQQNAFYQVLNMPNLNADQRNGFIQSLKDDPSQSANVLGEAQKLNDSQAPKADAQQNKFNKDQQSAFYEILNMPNLNEEQRNGFIQSLKDDPSQSTNVLGEAKKLNESQAPKADNNFNKEQQNAFYEILNMPNLNEEQRNGFIQSLKDDPSQSANLLAEAKKLNESQAPKADNKFNKEQQNAFYEILHLPNLNEEQRNGFIQSLKDDPSQSANLLAEAKKLNDAQAPKADNKFNKEQQNAFYEILHLPN

SEQ ID NO: 28 - protein, 56 aa, Artificial Sequence
  Capture domain
TYKLILNGKTLKGETTTEAVDAATAEKVFKQYANDNGVDGEWTYDDATKTFTVTEG

SEQ ID NO: 29 - protein, 189 aa, Artificial Sequence
  Capture domain
KTDTYKLILNGKTLKGETTTEAVDAATAEKVFKQYANDNGVDGEWTYDDATKTFTVTEKPEVIDASELTPAVTTYKLVINGKTLKGETTTKAVDAETAEKAFKQYANDNGVDGVWTYDDATKTFTVTEMVTEVPGDAPTEPEKPEASIPLVPLTPATPIAKDDAKKDDTKKEDAKKPEAKKDDAKKAET

SEQ ID NO: 30 - protein, 76 aa, Artificial Sequence
  Capture domain
KEETPETPETDSEEEVTIKANLIFANGSTQTAEFKGTFEKATSEAYAYADTLKKDNGEYTVDVADKGYTLNLKFAG

SEQ ID NO: 31 - protein, 7 aa, Artificial Sequence
  Capture domain
  MISC_FEATURE (5)..(7): Xaa can be any naturally occurring amino acid
GYVSXXX

SEQ ID NO: 32 - protein, 226 aa, Artificial Sequence
  Capture domain
SDVQLQESGPDLVKPSQSLSLTCTVTGYSITSGYTWHWIRQFPGNKQEWGYIHFSGYTNYNPSLKSRVSITRDTSKNQFFLHLNSVTTEDTATYYCARGDYGYEWFTYWGQGTLVTVSADIQMTQSSSSFSVSLGDRVTITCKASEDIHNRLAWYKQKPGNAPRLLISGATSLETGVPSRFSGSGSGKDYTLSITSLQNEDVATYYCQQYWIGPFTFGSGTNLEIK

SEQ ID NO: 33 - protein, 11 aa, Artificial Sequence
  Capture domain
GYVSRHPGGGC

SEQ ID NO: 34 - protein, 12 aa, Artificial Sequence
  Capture domain
GYVSRHPGGGGS

SEQ ID NO: 35 - protein, 11 aa, Artificial Sequence
  Capture domain
FHENWPSGGGC

SEQ ID NO: 36 - protein, 12 aa, Artificial Sequence
  Capture domain
FHENWPSGGGGS

SEQ ID NO: 37 - protein, 7 aa, Artificial Sequence
  Capture domain
GVVTINP

SEQ ID NO: 38 - protein, 7 aa, Artificial Sequence
  Capture domain
GLVTPSG

SEQ ID NO: 39 - protein, 7 aa, Artificial Sequence
  Capture domain
GYVSHRS

SEQ ID NO: 40 - protein, 7 aa, Artificial Sequence
  Capture domain
KVWILTP

SEQ ID NO: 41 - protein, 7 aa, Artificial Sequence
  Capture domain
KLWVIPQ

SEQ ID NO: 42 - protein, 479 aa, Artificial Sequence
  Capture domain
GVSAGESVQITLPKNEVQLNAYVLQEPPKGETYTYDWQLITHPRDYSGEMEGKHSQILKLSKLTPGLYEFKVIVEGQNAHGEGYVNVTVKPEPRKNRPPIAIVSPQFQEISLPTTSTVIDGSQSTDDDKIVQYHWEELKGPLREEKISEDTAILKLSKLVPGNYTFSLTVVDSDGATNSTTANLTVNKAVDYPPVANAGPNQVITLPQNSITLFGNQSTDDHGITSYEWSLSPSSKGKVVEMQGVRTPTLQLSAMQEGDYTYQLTVTDTIGQQATAQVTVIVQPENNKPPQADAGPDKELTLPVDSTTLDGSKSSDDQKIISYLWEKTQGPDGVQLENANSSVATVTGLQVGTYVFTLTVKDERNLQSQSSVNVIVKEEINKPPIAKITGNVVITLPTSTAELDGSKSSDDKGIVSYLWTRDEGSPAAGEVLNHSDHHPILFLSNLVEGTYTFHLKVTDAKGESDTDRTTVEVKPDPRG

SEQ ID NO: 43 - protein, 90 aa, Artificial Sequence
  Capture domain
SAGESVQITLPKNEVQLNAYVLQEPPKGETYTYDWQLITHPRDYSGEMEGKHSQILKLSKLTPGLYEFKVIVEGQNAHGEGYVNVTVKPE

SEQ ID NO: 44 - protein, 90 aa, Artificial Sequence
  Capture domain
IAIVSPQFQEISLPTTSTVIDGSQSTDDDKIVQYHWEELKGPLREEKISEDTAILKLSKLVPGNYTFSLTVVDSDGATNSTTANLTVNKA

SEQ ID NO: 45 - protein, 190 aa, Artificial Sequence
  Capture domain
MGVSAGESVQITLPKNEVQLNAYVLQEPPKGETYTYDWQLITHPRDYSGEMEGKHSQILKLSKLTPGLYEFKVIVEGQNAHGEGYVNVTVKPEPRKNRPPIAIVSPQFQEISLPTTSTVIDGSQSTDDDKIVQYHWEELKGPLREEKISEDTAILKLSKLVPGNYTFSLTVVDSDGATNSTTANLTVNKA

SEQ ID NO: 46 - protein, 91 aa, Artificial Sequence
  Capture domain
VANAGPNQVITLPQNSITLFGNQSTDDHGITSYEWSLSPSSKGKVVEMQGVRTPTLQLSAMQEGDYTYQLTVTDTIGQQATAQVTVIVQPE

SEQ ID NO: 47 - protein, 89 aa, Artificial Sequence
  Capture domain
QADAGPDKELTLPVDSTTLDGSKSSDDQKIISYLWEKTQGPDGVQLENANSSVATVTGLQVGTYVFTLTVKDERNLQSQSSVNVIVKEE

SEQ ID NO: 48 - protein, 93 aa, Artificial Sequence
  Capture domain
IAKITGNVVITLPTSTAELDGSKSSDDKGIVSYLWTRDEGSPAAGEVLNHSDHHPILFLSNLVEGTYTFHLKVTDAKGESDTDRTTVEVKPDP

SEQ ID NO: 49 - protein, 46 aa, Artificial Sequence
  Capture domain
LAEAKVLANRELDKYGVSDYYKNLINNAKTVEGVKALIDEILAALP

SEQ ID NO: 50 - protein, 30 aa, Artificial Sequence
  Linker peptide
  MISC_FEATURE (2)..(30): Each individual Gly may be present or absent
GGGGGGGGGGGGGGGGGGGGGGGGGGGGGG

SEQ ID NO: 51 - protein, 800 aa, Artificial Sequence
  elastin-like polypeptide
  MISC_FEATURE (61)..(800): May be present or absent in groups of the repeat unit Gly Val Gly Val Pro
GVGVPGVGVPGVGVPGVGVPGVGVPGVGVPGVGVPGVGVPGVGVPGVGVPGVGVPGVGVPGVGVPGVGVPGVGVPGVGVPGVGVPGVGVPGVGVPGVGVPGVGVPGVGVPGVGVPGVGVPGVGVPGVGVPGVGVPGVGVPGVGVPGVGVPGVGVPGVGVPGVGVPGVGVPGVGVPGVGVPGVGVPGVGVPGVGVPGVGVPGVGVPGVGVPGVGVPGVGVPGVGVPGVGVPGVGVPGVGVPGVGVPGVGVPGVGVPGVGVPGVGVPGVGVPGVGVPGVGVPGVGVPGVGVPGVGVPGVGVPGVGVPGVGVPGVGVPGVGVPGVGVPGVGVPGVGVPGVGVPGVGVPGVGVPGVGVPGVGVPGVGVPGVGVPGVGVPGVGVPGVGVPGVGVPGVGVPGVGVPGVGVPGVGVPGVGVPGVGVPGVGVPGVGVPGVGVPGVGVPGVGVPGVGVPGVGVPGVGVPGVGVPGVGVPGVGVPGVGVPGVGVPGVGVPGVGVPGVGVPGVGVPGVGVPGVGVPGVGVPGVGVPGVGVPGVGVPGVGVPGVGVPGVGVPGVGVPGVGVPGVGVPGVGVPGVGVPGVGVPGVGVPGVGVPGVGVPGVGVPGVGVPGVGVPGVGVPGVGVPGVGVPGVGVPGVGVPGVGVPGVGVPGVGVPGVGVPGVGVPGVGVPGVGVPGVGVPGVGVPGVGVPGVGVPGVGVPGVGVPGVGVPGVGVPGVGVPGVGVPGVGVPGVGVPGVGVPGVGVPGVGVPGVGVPGVGVPGVGVPGVGVPGVGVPGVGVPGVGVPGVGVPGVGVPGVGVPGVGVP

SEQ ID NO: 52 - protein, 800 aa, Artificial Sequence
  elastin-like polypeptide
  MISC_FEATURE (51)..(800): May be present or absent in groups of the repeat unit Gly Val Gly Val Pro Gly Val Gly Val Pro Gly Ala Gly Val Pro Gly Val Gly Val Pro Gly Val Gly Val Pro
GVGVPGVGVPGAGVPGVGVPGVGVPGVGVPGVGVPGAGVPGVGVPGVGVPGVGVPGVGVPGAGVPGVGVPGVGVPGVGVPGVGVPGAGVPGVGVPGVGVPGVGVPGVGVPGAGVPGVGVPGVGVPGVGVPGVGVPGAGVPGVGVPGVGVPGVGVPGVGVPGAGVPGVGVPGVGVPGVGVPGVGVPGAGVPGVGVPGVGVPGVGVPGVGVPGAGVPGVGVPGVGVPGVGVPGVGVPGAGVPGVGVPGVGVPGVGVPGVGVPGAGVPGVGVPGVGVPGVGVPGVGVPGAGVPGVGVPGVGVPGVGVPGVGVPGAGVPGVGVPGVGVPGVGVPGVGVPGAGVPGVGVPGVGVPGVGVPGVGVPGAGVPGVGVPGVGVPGVGVPGVGVPGAGVPGVGVPGVGVPGVGVPGVGVPGAGVPGVGVPGVGVPGVGVPGVGVPGAGVPGVGVPGVGVPGVGVPGVGVPGAGVPGVGVPGVGVPGVGVPGVGVPGAGVPGVGVPGVGVPGVGVPGVGVPGAGVPGVGVPGVGVPGVGVPGVGVPGAGVPGVGVPGVGVPGVGVPGVGVPGAGVPGVGVPGVGVPGVGVPGVGVPGAGVPGVGVPGVGVPGVGVPGVGVPGAGVPGVGVPGVGVPGVGVPGVGVPGAGVPGVGVPGVGVPGVGVPGVGVPGAGVPGVGVPGVGVPGVGVPGVGVPGAGVPGVGVPGVGVPGVGVPGVGVPGAGVPGVGVPGVGVPGVGVPGVGVPGAGVPGVGVPGVGVPGVGVPGVGVPGAGVPGVGVPGVGVPGVGVPGVGVPGAGVPGVGVPGVGVP

SEQ ID NO: 53 - protein, 800 aa, Artificial Sequence
  elastin-like polypeptide
  MISC_FEATURE (51)..(800): May be present or absent in groups of the repeat unit Gly Val Gly Val Pro Gly Ala Gly Val Pro
GVGVPGAGVPGVGVPGAGVPGVGVPGAGVPGVGVPGAGVPGVGVPGAGVPGVGVPGAGVPGVGVPGAGVPGVGVPGAGVPGVGVPGAGVPGVGVPGAGVPGVGVPGAGVPGVGVPGAGVPGVGVPGAGVPGVGVPGAGVPGVGVPGAGVPGVGVPGAGVPGVGVPGAGVPGVGVPGAGVPGVGVPGAGVPGVGVPGAGVPGVGVPGAGVPGVGVPGAGVPGVGVPGAGVPGVGVPGAGVPGVGVPGAGVPGVGVPGAGVPGVGVPGAGVPGVGVPGAGVPGVGVPGAGVPGVGVPGAGVPGVGVPGAGVPGVGVPGAGVPGVGVPGAGVPGVGVPGAGVPGVGVPGAGVPGVGVPGAGVPGVGVPGAGVPGVGVPGAGVPGVGVPGAGVPGVGVPGAGVPGVGVPGAGVPGVGVPGAGVPGVGVPGAGVPGVGVPGAGVPGVGVPGAGVPGVGVPGAGVPGVGVPGAGVPGVGVPGAGVPGVGVPGAGVPGVGVPGAGVPGVGVPGAGVPGVGVPGAGVPGVGVPGAGVPGVGVPGAGVPGVGVPGAGVPGVGVPGAGVPGVGVPGAGVPGVGVPGAGVPGVGVPGAGVPGVGVPGAGVPGVGVPGAGVPGVGVPGAGVPGVGVPGAGVPGVGVPGAGVPGVGVPGAGVPGVGVPGAGVPGVGVPGAGVPGVGVPGAGVPGVGVPGAGVPGVGVPGAGVPGVGVPGAGVPGVGVPGAGVPGVGVPGAGVPGVGVPGAGVPGVGVPGAGVPGVGVPGAGVPGVGVPGAGVPGVGVPGAGVPGVGVPGAGVPGVGVPGAGVP

SEQ ID NO: 54 - protein, 800 aa, Artificial Sequence
  elastin-like polypeptide
  MISC_FEATURE (51)..(800): May be present or absent in groups of the repeat unit Gly Val Gly Val Pro Gly Val Gly Val Pro Gly Leu Gly Val Pro Gly Val Gly Val Pro Gly Val Gly Val Pro
GVGVPGVGVPGLGVPGVGVPGVGVPGVGVPGVGVPGLGVPGVGVPGVGVPGVGVPGVGVPGLGVPGVGVPGVGVPGVGVPGVGVPGLGVPGVGVPGVGVPGVGVPGVGVPGLGVPGVGVPGVGVPGVGVPGVGVPGLGVPGVGVPGVGVPGVGVPGVGVPGLGVPGVGVPGVGVPGVGVPGVGVPGLGVPGVGVPGVGVPGVGVPGVGVPGLGVPGVGVPGVGVPGVGVPGVGVPGLGVPGVGVPGVGVPGVGVPGVGVPGLGVPGVGVPGVGVPGVGVPGVGVPGLGVPGVGVPGVGVPGVGVPGVGVPGLGVPGVGVPGVGVPGVGVPGVGVPGLGVPGVGVPGVGVPGVGVPGVGVPGLGVPGVGVPGVGVPGVGVPGVGVPGLGVPGVGVPGVGVPGVGVPGVGVPGLGVPGVGVPGVGVPGVGVPGVGVPGLGVPGVGVPGVGVPGVGVPGVGVPGLGVPGVGVPGVGVPGVGVPGVGVPGLGVPGVGVPGVGVPGVGVPGVGVPGLGVPGVGVPGVGVPGVGVPGVGVPGLGVPGVGVPGVGVPGVGVPGVGVPGLGVPGVGVPGVGVPGVGVPGVGVPGLGVPGVGVPGVGVPGVGVPGVGVPGLGVPGVGVPGVGVPGVGVPGVGVPGLGVPGVGVPGVGVPGVGVPGVGVPGLGVPGVGVPGVGVPGVGVPGVGVPGLGVPGVGVPGVGVPGVGVPGVGVPGLGVPGVGVPGVGVPGVGVPGVGVPGLGVPGVGVPGVGVPGVGVPGVGVPGLGVPGVGVPGVGVPGVGVPGVGVPGLGVPGVGVPGVGVP

SEQ ID NO: 55 - protein, 800 aa, Artificial Sequence
  elastin-like polypeptide
  MISC_FEATURE (2)..(2): Xaa can be Gly, Ala, Val, Ile, Leu, Phe, Tyr, Trp, Lys, Arg, Asp, Glu or Ser
  MISC_FEATURE (7)..(7): Xaa can be Gly, Ala, Val, Ile, Leu, Phe, Tyr, Trp, Lys, Arg, Asp, Glu or Ser
  MISC_FEATURE (12)..(12): Xaa can be Gly, Ala, Val, Ile, Leu, Phe, Tyr, Trp, Lys, Arg, Asp, Glu or Ser
  MISC_FEATURE (17)..(17): Xaa can be Gly, Ala, Val, Ile, Leu, Phe, Tyr, Trp, Lys, Arg, Asp, Glu or Ser
  MISC_FEATURE (22)..(22): Xaa can be Gly, Ala, Val, Ile, Leu, Phe, Tyr, Trp, Lys, Arg, Asp, Glu or Ser
  MISC_FEATURE (27)..(27): Xaa can be Gly, Ala, Val, Ile, Leu, Phe, Tyr, Trp, Lys, Arg, Asp, Glu or Ser
  MISC_FEATURE (32)..(32): Xaa can be Gly, Ala, Val, Ile, Leu, Phe, Tyr, Trp, Lys, Arg, Asp, Glu or Ser
  MISC_FEATURE (37)..(37): Xaa can be Gly, Ala, Val, Ile, Leu, Phe, Tyr, Trp, Lys, Arg, Asp, Glu or Ser
  MISC_FEATURE (42)..(42): Xaa can be Gly, Ala, Val, Ile, Leu, Phe, Tyr, Trp, Lys, Arg, Asp, Glu or Ser
  MISC_FEATURE (47)..(47): Xaa can be Gly, Ala, Val, Ile, Leu, Phe, Tyr, Trp, Lys, Arg, Asp, Glu or Ser
  MISC_FEATURE (51)..(800): May be present or absent in groups of the repeat unit Gly Xaa Gly Val Pro
  MISC_FEATURE (52)..(52): Xaa can be Gly, Ala, Val, Ile, Leu, Phe, Tyr, Trp, Lys, Arg, Asp, Glu or Ser
  MISC_FEATURE (57)..(57): Xaa can be Gly, Ala, Val, Ile, Leu, Phe, Tyr, Trp, Lys, Arg, Asp, Glu or Ser
  MISC_FEATURE (62)..(62): Xaa can be Gly, Ala, Val, Ile, Leu, Phe, Tyr, Trp, Lys, Arg, Asp, Glu or Ser
  MISC_FEATURE (67)..(67): Xaa can be Gly, Ala, Val, Ile, Leu, Phe, Tyr, Trp, Lys, Arg, Asp, Glu or Ser
  MISC_FEATURE (72)..(72): Xaa can be Gly, Ala, Val, Ile, Leu, Phe, Tyr, Trp, Lys, Arg, Asp, Glu or Ser
  MISC_FEATURE (77)..(77): Xaa can be Gly, Ala, Val, Ile, Leu, Phe, Tyr, Trp, Lys, Arg, Asp, Glu or Ser
  MISC_FEATURE (82)..(82): Xaa can be Gly, Ala, Val, Ile, Leu, Phe, Tyr, Trp, Lys, Arg, Asp, Glu or Ser
  MISC_FEATURE (87)..(87): Xaa can be Gly, Ala, Val, Ile, Leu, Phe, Tyr, Trp, Lys, Arg, Asp, Glu or Ser
  MISC_FEATURE (92)..(92): Xaa can be Gly, Ala, Val, Ile, Leu, Phe, Tyr, Trp, Lys, Arg, Asp, Glu or Ser
  MISC_FEATURE (97)..(97): Xaa can be Gly, Ala, Val, Ile, Leu, Phe, Tyr, Trp, Lys, Arg, Asp, Glu or Ser
  MISC_FEATURE (102)..(102): Xaa can be Gly, Ala, Val, Ile, Leu, Phe, Tyr, Trp, Lys, Arg, Asp, Glu or Ser
  MISC_FEATURE (107)..(107): Xaa can be Gly, Ala, Val, Ile, Leu, Phe, Tyr, Trp, Lys, Arg, Asp, Glu or Ser
  MISC_FEATURE (112)..(112): Xaa can be Gly, Ala, Val, Ile, Leu, Phe, Tyr, Trp, Lys, Arg, Asp, Glu or Ser
  MISC_FEATURE (117)..(117): Xaa can be Gly, Ala, Val, Ile, Leu, Phe, Tyr, Trp, Lys, Arg, Asp, Glu or Ser
  MISC_FEATURE (122)..(122): Xaa can be Gly, Ala, Val, Ile, Leu, Phe, Tyr, Trp, Lys, Arg, Asp, Glu or Ser
  MISC_FEATURE (127)..(127): Xaa can be Gly, Ala, Val, Ile, Leu, Phe, Tyr, Trp, Lys, Arg, Asp, Glu or Ser
  MISC_FEATURE (132)..(132): Xaa can be Gly, Ala, Val, Ile, Leu, Phe, Tyr, Trp, Lys, Arg, Asp, Glu or Ser
  MISC_FEATURE (137)..(137): Xaa can be Gly, Ala, Val, Ile, Leu, Phe, Tyr, Trp, Lys, Arg, Asp, Glu or Ser
  MISC_FEATURE (142)..(142): Xaa can be Gly, Ala, Val, Ile, Leu, Phe, Tyr, Trp, Lys, Arg, Asp, Glu or Ser
  MISC_FEATURE (147)..(147): Xaa can be Gly, Ala, Val, Ile, Leu, Phe, Tyr, Trp, Lys, Arg, Asp, Glu or Ser
  MISC_FEATURE (152)..(152): Xaa can be Gly, Ala, Val, Ile, Leu, Phe, Tyr, Trp, Lys, Arg, Asp, Glu or Ser
  MISC_FEATURE (157)..(157): Xaa can be Gly, Ala, Val, Ile, Leu, Phe, Tyr, Trp, Lys, Arg, Asp, Glu or Ser
  MISC_FEATURE (162)..(162): Xaa can be Gly, Ala, Val, Ile, Leu, Phe, Tyr, Trp, Lys, Arg, Asp, Glu or Ser
  MISC_FEATURE (167)..(167): Xaa can be Gly, Ala, Val, Ile, Leu, Phe, Tyr, Trp, Lys, Arg, Asp, Glu or Ser
  MISC_FEATURE (172)..(172): Xaa can be Gly, Ala, Val, Ile, Leu, Phe, Tyr, Trp, Lys, Arg, Asp, Glu or Ser
  MISC_FEATURE (177)..(177): Xaa can be Gly, Ala, Val, Ile, Leu, Phe, Tyr, Trp, Lys, Arg, Asp, Glu or Ser
  MISC_FEATURE (182)..(182): Xaa can be Gly, Ala, Val, Ile, Leu, Phe, Tyr, Trp, Lys, Arg, Asp, Glu or Ser
  MISC_FEATURE (187)..(187): Xaa can be Gly, Ala, Val, Ile, Leu, Phe, Tyr, Trp, Lys, Arg, Asp, Glu or Ser
  MISC_FEATURE (192)..(192): Xaa can be Gly, Ala, Val, Ile, Leu, Phe, Tyr, Trp, Lys, Arg, Asp, Glu or Ser
  MISC_FEATURE (197)..(197): Xaa can be Gly, Ala, Val, Ile, Leu, Phe, Tyr, Trp, Lys, Arg, Asp, Glu or Ser
  MISC_FEATURE (202)..(202): Xaa can be Gly, Ala, Val, Ile, Leu, Phe, Tyr, Trp, Lys, Arg, Asp, Glu or Ser
  MISC_FEATURE (207)..(207): Xaa can be Gly, Ala, Val, Ile, Leu, Phe, Tyr, Trp, Lys, Arg, Asp, Glu or Ser
  MISC_FEATURE (212)..(212): Xaa can be Gly, Ala, Val, Ile, Leu, Phe, Tyr, Trp, Lys, Arg, Asp, Glu or Ser
  MISC_FEATURE (217)..(217): Xaa can be Gly, Ala, Val, Ile, Leu, Phe, Tyr, Trp, Lys, Arg, Asp, Glu or Ser
  MISC_FEATURE (222)..(222): Xaa can be Gly, Ala, Val, Ile, Leu, Phe, Tyr, Trp, Lys, Arg, Asp, Glu or Ser
  MISC_FEATURE (227)..(227): Xaa can be Gly, Ala, Val, Ile, Leu, Phe, Tyr, Trp, Lys, Arg, Asp, Glu or Ser
  MISC_FEATURE (232)..(232): Xaa can be Gly, Ala, Val, Ile, Leu, Phe, Tyr, Trp, Lys, Arg, Asp, Glu or Ser
  MISC_FEATURE (237)..(237): Xaa can be Gly, Ala, Val, Ile, Leu, Phe, Tyr, Trp, Lys, Arg, Asp, Glu or Ser
  MISC_FEATURE (242)..(242): Xaa can be Gly, Ala, Val, Ile, Leu, Phe, Tyr, Trp, Lys, Arg, Asp, Glu or Ser
  MISC_FEATURE (247)..(247): Xaa can be Gly, Ala, Val, Ile, Leu, Phe, Tyr, Trp, Lys, Arg, Asp, Glu or Ser
  MISC_FEATURE (252)..(252): Xaa can be Gly, Ala, Val, Ile, Leu, Phe, Tyr, Trp, Lys, Arg, Asp, Glu or Ser
  MISC_FEATURE (257)..(257): Xaa can be Gly, Ala, Val, Ile, Leu, Phe, Tyr, Trp, Lys, Arg, Asp, Glu or Ser
  MISC_FEATURE (262)..(262): Xaa can be Gly, Ala, Val, Ile, Leu, Phe, Tyr, Trp, Lys, Arg, Asp, Glu or Ser
  MISC_FEATURE (267)..(267): Xaa can be Gly, Ala, Val, Ile, Leu, Phe, Tyr, Trp, Lys, Arg, Asp, Glu or Ser
  MISC_FEATURE (272)..(272): Xaa can be Gly, Ala, Val, Ile, Leu, Phe, Tyr, Trp, Lys, Arg, Asp, Glu or Ser
  MISC_FEATURE (277)..(277): Xaa can be Gly, Ala, Val, Ile, Leu, Phe, Tyr, Trp, Lys, Arg, Asp, Glu or Ser
  MISC_FEATURE (282)..(282): Xaa can be Gly, Ala, Val, Ile, Leu, Phe, Tyr, Trp, Lys, Arg, Asp, Glu or Ser
  MISC_FEATURE (287)..(287): Xaa can be Gly, Ala, Val, Ile, Leu, Phe, Tyr, Trp, Lys, Arg, Asp, Glu or Ser
  MISC_FEATURE (292)..(292): Xaa can be Gly, Ala, Val, Ile, Leu, Phe, Tyr, Trp, Lys, Arg, Asp, Glu or Ser
  MISC_FEATURE (297)..(297): Xaa can be Gly, Ala, Val, Ile, Leu, Phe, Tyr, Trp, Lys, Arg, Asp, Glu or Ser
  MISC_FEATURE (302)..(302): Xaa can be Gly, Ala, Val, Ile, Leu, Phe, Tyr, Trp, Lys, Arg, Asp, Glu or Ser
  MISC_FEATURE (307)..(307): Xaa can be Gly, Ala, Val, Ile, Leu, Phe, Tyr, Trp, Lys, Arg, Asp, Glu or Ser
  MISC_FEATURE (312)..(312): Xaa can be Gly, Ala, Val, Ile, Leu, Phe, Tyr, Trp, Lys, Arg, Asp, Glu or Ser
  MISC_FEATURE (317)..(317): Xaa can be Gly, Ala, Val, Ile, Leu, Phe, Tyr, Trp, Lys, Arg, Asp, Glu or Ser
  MISC_FEATURE (322)..(322): Xaa can be Gly, Ala, Val, Ile, Leu, Phe, Tyr, Trp, Lys, Arg, Asp, Glu or Ser
  MISC_FEATURE (327)..(327): Xaa can be Gly, Ala, Val, Ile, Leu, Phe, Tyr, Trp, Lys, Arg, Asp, Glu or Ser
  MISC_FEATURE (332)..(332): Xaa can be Gly, Ala, Val, Ile, Leu, Phe, Tyr, Trp, Lys, Arg, Asp, Glu or Ser
  MISC_FEATURE (337)..(337): Xaa can be Gly, Ala, Val, Ile, Leu, Phe, Tyr, Trp, Lys, Arg, Asp, Glu or Ser
  MISC_FEATURE (342)..(342): Xaa can be Gly, Ala, Val, Ile, Leu, Phe, Tyr, Trp, Lys, Arg, Asp, Glu or Ser
  MISC_FEATURE (347)..(347): Xaa can be Gly, Ala, Val, Ile, Leu, Phe, Tyr, Trp, Lys, Arg, Asp, Glu or Ser
  MISC_FEATURE (352)..(352): Xaa can be Gly, Ala, Val, Ile, Leu, Phe, Tyr, Trp, Lys, Arg, Asp, Glu or Ser
  MISC_FEATURE (357)..(357): Xaa can be Gly, Ala, Val, Ile, Leu, Phe, Tyr, Trp, Lys, Arg, Asp, Glu or Ser
  MISC_FEATURE (362)..(362): Xaa can be Gly, Ala, Val, Ile, Leu, Phe, Tyr, Trp, Lys, Arg, Asp, Glu or Ser
  MISC_FEATURE (367)..(367): Xaa can be Gly, Ala, Val, Ile, Leu, Phe, Tyr, Trp, Lys, Arg, Asp, Glu or Ser
  MISC_FEATURE (372)..(372): Xaa can be Gly, Ala, Val, Ile, Leu, Phe, Tyr, Trp, Lys, Arg, Asp, Glu or Ser
  MISC_FEATURE (377)..(377): Xaa can be Gly, Ala, Val, Ile, Leu, Phe, Tyr, Trp, Lys, Arg, Asp, Glu or Ser
  MISC_FEATURE (382)..(382): Xaa can be Gly, Ala, Val, Ile, Leu, Phe, Tyr, Trp, Lys, Arg, Asp, Glu or Ser
  MISC_FEATURE (387)..(387): Xaa can be Gly, Ala, Val, Ile, Leu, Phe, Tyr, Trp, Lys, Arg, Asp, Glu or Ser
  MISC_FEATURE (392)..(392): Xaa can be Gly, Ala, Val, Ile, Leu, Phe, Tyr, Trp, Lys, Arg, Asp, Glu or Ser
  MISC_FEATURE (397)..(397): Xaa can be Gly, Ala, Val, Ile, Leu, Phe, Tyr, Trp, Lys, Arg, Asp, Glu or Ser
  MISC_FEATURE (402)..(402): Xaa can be Gly, Ala, Val, Ile, Leu, Phe, Tyr, Trp, Lys, Arg, Asp, Glu or Ser
  MISC_FEATURE (407)..(407): Xaa can be Gly, Ala, Val, Ile, Leu, Phe, Tyr, Trp, Lys, Arg, Asp, Glu or Ser
  MISC_FEATURE (412)..(412): Xaa can be Gly, Ala, Val, Ile, Leu, Phe, Tyr, Trp, Lys, Arg, Asp, Glu or Ser
  MISC_FEATURE (417)..(417): Xaa can be Gly, Ala, Val, Ile, Leu, Phe, Tyr, Trp, Lys, Arg, Asp, Glu or Ser
  MISC_FEATURE (422)..(422): Xaa can be Gly, Ala, Val, Ile, Leu, Phe, Tyr, Trp, Lys, Arg, Asp, Glu or Ser
  MISC_FEATURE (427)..(427): Xaa can be Gly, Ala, Val, Ile, Leu, Phe, Tyr, Trp, Lys, Arg, Asp, Glu or Ser
  MISC_FEATURE (432)..(432): Xaa can be Gly, Ala, Val, Ile, Leu, Phe, Tyr, Trp, Lys, Arg, Asp, Glu or Ser
  MISC_FEATURE (437)..(437): Xaa can be Gly, Ala, Val, Ile, Leu, Phe, Tyr, Trp, Lys, Arg, Asp, Glu or Ser
  MISC_FEATURE (442)..(442): Xaa can be Gly, Ala, Val, Ile, Leu, Phe, Tyr, Trp, Lys, Arg, Asp, Glu or Ser
  MISC_FEATURE (447)..(447): Xaa can be Gly, Ala, Val, Ile, Leu, Phe, Tyr, Trp, Lys, Arg, Asp, Glu or Ser
  MISC_FEATURE (452)..(452): Xaa can be Gly, Ala, Val, Ile, Leu, Phe, Tyr, Trp, Lys, Arg, Asp, Glu or Ser
  MISC_FEATURE (457)..(457): Xaa can be Gly, Ala, Val, Ile, Leu, Phe, Tyr, Trp, Lys, Arg, Asp, Glu or Ser
  MISC_FEATURE (462)..(462): Xaa can be Gly, Ala, Val, Ile, Leu, Phe, Tyr, Trp, Lys, Arg, Asp, Glu or Ser
  MISC_FEATURE (467)..(467): Xaa can be Gly, Ala, Val, Ile, Leu, Phe, Tyr, Trp, Lys, Arg, Asp, Glu or Ser
  MISC_FEATURE (472)..(472): Xaa can be Gly, Ala, Val, Ile, Leu, Phe, Tyr, Trp, Lys, Arg, Asp, Glu or Ser
  MISC_FEATURE (477)..(477): Xaa can be Gly, Ala, Val, Ile, Leu, Phe, Tyr, Trp, Lys, Arg, Asp, Glu or Ser
  MISC_FEATURE (482)..(482): Xaa can be Gly, Ala, Val, Ile, Leu, Phe, Tyr, Trp, Lys, Arg, Asp, Glu or Ser
  MISC_FEATURE (487)..(487): Xaa can be Gly, Ala, Val, Ile, Leu, Phe, Tyr, Trp, Lys, Arg, Asp, Glu or Ser
  MISC_FEATURE (492)..(492): Xaa can be Gly, Ala, Val, Ile, Leu, Phe, Tyr, Trp, Lys, Arg, Asp, Glu or Ser
  MISC_FEATURE (497)..(497): Xaa can be Gly, Ala, Val, Ile, Leu, Phe, Tyr, Trp, Lys, Arg, Asp, Glu or Ser
  MISC_FEATURE (502)..(502): Xaa can be Gly, Ala, Val, Ile, Leu, Phe, Tyr, Trp, Lys, Arg, Asp, Glu or Ser
  MISC_FEATURE (507)..(507): Xaa can be Gly, Ala, Val, Ile, Leu, Phe, Tyr, Trp, Lys, Arg, Asp, Glu or Ser
  MISC_FEATURE (512)..(512): Xaa can be Gly, Ala, Val, Ile, Leu, Phe, Tyr, Trp, Lys, Arg, Asp, Glu or Ser
  MISC_FEATURE (517)..(517): Xaa can be Gly, Ala, Val, Ile, Leu, Phe, Tyr, Trp, Lys, Arg, Asp, Glu or Ser
  MISC_FEATURE (522)..(522): Xaa can be Gly, Ala, Val, Ile, Leu, Phe, Tyr, Trp, Lys, Arg, Asp, Glu or Ser
  MISC_FEATURE (527)..(527): Xaa can be Gly, Ala, Val, Ile, Leu, Phe, Tyr, Trp, Lys, Arg, Asp, Glu or Ser
  MISC_FEATURE (532)..(532): Xaa can be Gly, Ala, Val, Ile, Leu, Phe, Tyr, Trp, Lys, Arg, Asp, Glu or Ser
  MISC_FEATURE (537)..(537): Xaa can be Gly, Ala, Val, Ile, Leu, Phe, Tyr, Trp, Lys, Arg, Asp, Glu or Ser
  MISC_FEATURE (542)..(542): Xaa can be Gly, Ala, Val, Ile, Leu, Phe, Tyr, Trp, Lys, Arg, Asp, Glu or Ser
  MISC_FEATURE (547)..(547): Xaa can be Gly, Ala, Val, Ile, Leu, Phe, Tyr, Trp, Lys, Arg, Asp, Glu or Ser
  MISC_FEATURE (552)..(552): Xaa can be Gly, Ala, Val, Ile, Leu, Phe, Tyr, Trp, Lys, Arg, Asp, Glu or Ser
  MISC_FEATURE (557)..(557): Xaa can be Gly, Ala, Val, Ile, Leu, Phe, Tyr, Trp, Lys, Arg, Asp, Glu or Ser
  MISC_FEATURE (562)..(562): Xaa can be Gly, Ala, Val, Ile, Leu, Phe, Tyr, Trp, Lys, Arg, Asp, Glu or Ser
  MISC_FEATURE (567)..(567): Xaa can be Gly, Ala, Val, Ile, Leu, Phe, Tyr, Trp, Lys, Arg, Asp, Glu or Ser
  MISC_FEATURE (572)..(572): Xaa can be Gly, Ala, Val, Ile, Leu, Phe, Tyr, Trp, Lys, Arg, Asp, Glu or Ser
  MISC_FEATURE (577)..(577): Xaa can be Gly, Ala, Val, Ile, Leu, Phe, Tyr, Trp, Lys, Arg, Asp, Glu or Ser
  MISC_FEATURE (582)..(582): Xaa can be Gly, Ala, Val, Ile, Leu, Phe, Tyr, Trp, Lys, Arg, Asp, Glu or Ser
  MISC_FEATURE (587)..(587): Xaa can be Gly, Ala, Val, Ile, Leu, Phe, Tyr, Trp, Lys, Arg, Asp, Glu or Ser
  MISC_FEATURE (592)..(592): Xaa can be Gly, Ala, Val, Ile, Leu, Phe, Tyr, Trp, Lys, Arg, Asp, Glu or Ser
  MISC_FEATURE (597)..(597): Xaa can be Gly, Ala, Val, Ile, Leu, Phe, Tyr, Trp, Lys, Arg, Asp, Glu or Ser
  MISC_FEATURE (602)..(602): Xaa can be Gly, Ala, Val, Ile, Leu, Phe, Tyr, Trp, Lys, Arg, Asp, Glu or Ser
  MISC_FEATURE (607)..(607): Xaa can be Gly, Ala, Val, Ile, Leu, Phe, Tyr, Trp, Lys, Arg, Asp, Glu or Ser
  MISC_FEATURE (612)..(612): Xaa can be Gly, Ala, Val, Ile, Leu, Phe, Tyr, Trp, Lys, Arg, Asp, Glu or Ser
  MISC_FEATURE (617)..(617): Xaa can be Gly, Ala, Val, Ile, Leu, Phe, Tyr, Trp, Lys, Arg, Asp, Glu or Ser
  MISC_FEATURE (622)..(622): Xaa can be Gly, Ala, Val, Ile, Leu, Phe, Tyr, Trp, Lys, Arg, Asp, Glu or Ser
  MISC_FEATURE (627)..(627): Xaa can be Gly, Ala, Val, Ile, Leu, Phe, Tyr, Trp, Lys, Arg, Asp, Glu or Ser
  MISC_FEATURE (632)..(632): Xaa can be Gly, Ala, Val, Ile, Leu, Phe, Tyr, Trp, Lys, Arg, Asp, Glu or Ser
  MISC_FEATURE (637)..(637): Xaa can be Gly, Ala, Val, Ile, Leu, Phe, Tyr, Trp, Lys, Arg, Asp, Glu or Ser
  MISC_FEATURE (642)..(642): Xaa can be Gly, Ala, Val, Ile, Leu, Phe, Tyr, Trp, Lys, Arg, Asp, Glu or Ser
  MISC_FEATURE (647)..(647): Xaa can be Gly, Ala, Val, Ile, Leu, Phe, Tyr, Trp, Lys, Arg, Asp, Glu or Ser
  MISC_FEATURE (652)..(652): Xaa can be Gly, Ala, Val, Ile, Leu, Phe, Tyr, Trp, Lys, Arg, Asp, Glu or Ser
  MISC_FEATURE (657)..(657): Xaa can be Gly, Ala, Val, Ile, Leu, Phe, Tyr, Trp, Lys, Arg, Asp, Glu or Ser
  MISC_FEATURE (662)..(662): Xaa can be Gly, Ala, Val, Ile, Leu, Phe, Tyr, Trp, Lys, Arg, Asp, Glu or Ser
  MISC_FEATURE (667)..(667): Xaa can be Gly, Ala, Val, Ile, Leu, Phe, Tyr, Trp, Lys, Arg, Asp, Glu or Ser
  MISC_FEATURE (672)..(672): Xaa can be Gly, Ala, Val, Ile, Leu, Phe, Tyr, Trp, Lys, Arg, Asp, Glu or Ser
  MISC_FEATURE (677)..(677): Xaa can be Gly, Ala, Val, Ile, Leu, Phe, Tyr, Trp, Lys, Arg, Asp, Glu or Ser
  MISC_FEATURE (682)..(682): Xaa can be Gly, Ala, Val, Ile, Leu, Phe, Tyr, Trp, Lys, Arg, Asp, Glu or Ser
  MISC_FEATURE (687)..(687): Xaa can be Gly, Ala, Val, Ile, Leu, Phe, Tyr, Trp, Lys, Arg, Asp, Glu or Ser
  MISC_FEATURE (692)..(692): Xaa can be Gly, Ala, Val, Ile, Leu, Phe, Tyr, Trp, Lys, Arg, Asp, Glu or Ser
  MISC_FEATURE (697)..(697): Xaa can be Gly, Ala, Val, Ile, Leu, Phe, Tyr, Trp, Lys, Arg, Asp, Glu or Ser
  MISC_FEATURE (702)..(702): Xaa can be Gly, Ala, Val, Ile, Leu, Phe, Tyr, Trp, Lys, Arg, Asp, Glu or Ser
  MISC_FEATURE (707)..(707): Xaa can be Gly, Ala, Val, Ile, Leu, Phe, Tyr, Trp, Lys, Arg, Asp, Glu or Ser
  MISC_FEATURE (712)..(712): Xaa can be Gly, Ala, Val, Ile, Leu, Phe, Tyr, Trp, Lys, Arg, Asp, Glu or Ser
  MISC_FEATURE (717)..(717): Xaa can be Gly, Ala, Val, Ile, Leu, Phe, Tyr, Trp, Lys, Arg, Asp, Glu or Ser
  MISC_FEATURE (722)..(722): Xaa can be Gly, Ala, Val, Ile, Leu, Phe, Tyr, Trp, Lys, Arg, Asp, Glu or Ser
  MISC_FEATURE (727)..(727): Xaa can be Gly, Ala, Val, Ile, Leu, Phe, Tyr, Trp, Lys, Arg, Asp, Glu or Ser
  MISC_FEATURE (732)..(732): Xaa can be Gly, Ala, Val, Ile, Leu, Phe, Tyr, Trp, Lys, Arg, Asp, Glu or Ser
  MISC_FEATURE (737)..(737): Xaa can be Gly, Ala, Val, Ile, Leu, Phe, Tyr, Trp, Lys, Arg, Asp, Glu or Ser
  MISC_FEATURE (742)..(742): Xaa can be Gly, Ala, Val, Ile, Leu, Phe, Tyr, Trp, Lys, Arg, Asp, Glu or Ser
  MISC_FEATURE (747)..(747): Xaa can be Gly, Ala, Val, Ile, Leu, Phe, Tyr, Trp, Lys, Arg, Asp, Glu or Ser
  MISC_FEATURE (752)..(752): Xaa can be Gly, Ala, Val, Ile, Leu, Phe, Tyr, Trp, Lys, Arg, Asp, Glu or Ser
  MISC_FEATURE (757)..(757): Xaa can be Gly, Ala, Val, Ile, Leu, Phe, Tyr, Trp, Lys, Arg, Asp, Glu or Ser
  MISC_FEATURE (762)..(762): Xaa can be Gly, Ala, Val, Ile, Leu, Phe, Tyr, Trp, Lys, Arg, Asp, Glu or Ser
  MISC_FEATURE (767)..(767): Xaa can be Gly, Ala, Val, Ile, Leu, Phe, Tyr, Trp, Lys, Arg, Asp, Glu or Ser
  MISC_FEATURE (772)..(772): Xaa can be Gly, Ala, Val, Ile, Leu, Phe, Tyr, Trp, Lys, Arg, Asp, Glu or Ser
  MISC_FEATURE (777)..(777): Xaa can be Gly, Ala, Val, Ile, Leu, Phe, Tyr, Trp, Lys, Arg, Asp, Glu or Ser
  MISC_FEATURE (782)..(782): Xaa can be Gly, Ala, Val, Ile, Leu, Phe, Tyr, Trp, Lys, Arg, Asp, Glu or Ser
  MISC_FEATURE (787)..(787): Xaa can be Gly, Ala, Val, Ile, Leu, Phe, Tyr, Trp, Lys, Arg, Asp, Glu or Ser
  MISC_FEATURE (792)..(792): Xaa can be Gly, Ala, Val, Ile, Leu, Phe, Tyr, Trp, Lys, Arg, Asp, Glu or Ser
  MISC_FEATURE (797)..(797): Xaa can be Gly, Ala, Val, Ile, Leu, Phe, Tyr, Trp, Lys, Arg, Asp, Glu or Ser
GXGVPGXGVPGXGVPGXGVPGXGVPGXGVPGXGVPGXGVPGXGVPGXGVPGXGVPGXGVPGXGVPGXGVPGXGVPGXGVPGXGVPGXGVPGXGVPGXGVPGXGVPGXGVPGXGVPGXGVPGXGVPGXGVPGXGVPGXGVPGXGVPGXGVPGXGVPGXGVPGXGVPGXGVPGXGVPGXGVPGXGVPGXGVPGXGVPGXGVPGXGVPGXGVPGXGVPGXGVPGXGVPGXGVPGXGVPGXGVPGXGVPGXGVPGXGVPGXGVPGXGVPGXGVPGXGVPGXGVPGXGVPGXGVPGXGVPGXGVPGXGVPGXGVPGXGVPGXGVPGXGVPGXGVPGXGVPGXGVPGXGVPGXGVPGXGVPGXGVPGXGVPGXGVPGXGVPGXGVPGXGVPGXGVPGXGVPGXGVPGXGVPGXGVPGXGVPGXGVPGXGVPGXGVPGXGVPGXGVPGXGVPGXGVPGXGVPGXGVPGXGVPGXGVPGXGVPGXGVPGXGVPGXGVPGXGVPGXGVPGXGVPGXGVPGXGVPGXGVPGXGVPGXGVPGXGVPGXGVPGXGVPGXGVPGXGVPGXGVPGXGVPGXGVPGXGVPGXGVPGXGVPGXGVPGXGVPGXGVPGXGVPGXGVPGXGVPGXGVPGXGVPGXGVPGXGVPGXGVPGXGVPGXGVPGXGVPGXGVPGXGVPGXGVPGXGVPGXGVPGXGVPGXGVPGXGVPGXGVPGXGVPGXGVPGXGVPGXGVPGXGVPGXGVPGXGVPGXGVPGXGVPGXGVPGXGVPGXGVPGXGVPGXGVPGXGVPGXGVPGXGVPGXGVPGXGVPGXGVP

SEQ ID NO: 56 - protein, 1440 aa, Artificial Sequence
  elastin-like polypeptide
  MISC_FEATURE (1)..(1): Xaa can be any naturally occurring amino acid
  MISC_FEATURE (2)..(2): Xaa can be any naturally occurring amino acid
  MISC_FEATURE (4)..(4): Xaa can be any naturally occurring amino acid except Pro or Gly
  MISC_FEATURE (5)..(5): Xaa can be any naturally occurring amino acid except Pro or Gly
  MISC_FEATURE (6)..(6): Xaa can be any naturally occurring amino acid except Pro or Gly
  MISC_FEATURE (7)..(7): Xaa can be any naturally occurring amino acid except Pro or Gly
  MISC_FEATURE (9)..(9): Xaa can be any naturally occurring amino acid
  MISC_FEATURE (10)..(10): Xaa can be any naturally occurring amino acid
  MISC_FEATURE (11)..(11): Xaa can be any naturally occurring amino acid
  MISC_FEATURE (13)..(13): Xaa can be any naturally occurring amino acid except Pro or Gly
  MISC_FEATURE (14)..(14): Xaa can be any naturally occurring amino acid except Pro or Gly
  MISC_FEATURE (15)..(15): Xaa can be any naturally occurring amino acid except Pro or Gly
  MISC_FEATURE (16)..(16): Xaa can be any naturally occurring amino acid except Pro or Gly
  MISC_FEATURE (18)..(18): Xaa can be any naturally occurring amino acid
  MISC_FEATURE (19)..(19): Xaa can be any naturally occurring amino acid
  MISC_FEATURE (20)..(20): Xaa can be any naturally occurring amino acid
  MISC_FEATURE (22)..(22): Xaa can be any naturally occurring amino acid except Pro or Gly
  MISC_FEATURE (23)..(23): Xaa can be any naturally occurring amino acid except Pro or Gly
  MISC_FEATURE (24)..(24): Xaa can be any naturally occurring amino acid except Pro or Gly
  MISC_FEATURE (25)..(25): Xaa can be any naturally occurring amino acid except Pro or Gly
  MISC_FEATURE (27)..(27): Xaa can be any naturally occurring amino acid
  MISC_FEATURE (28)..(28): Xaa can be any naturally occurring amino acid
  MISC_FEATURE (29)..(29): Xaa can be any naturally occurring amino acid
  MISC_FEATURE (31)..(31): Xaa can be any naturally occurring amino acid except Pro or Gly
  MISC_FEATURE (32)..(32): Xaa can be any naturally occurring amino acid except Pro or Gly
  MISC_FEATURE (33)..(33): Xaa can be any naturally occurring amino acid except Pro or Gly
  MISC_FEATURE (34)..(34): Xaa can be any naturally occurring amino acid except Pro or Gly
  MISC_FEATURE (36)..(36): Xaa can be any naturally occurring amino acid
  MISC_FEATURE (37)..(37): Xaa can be any naturally occurring amino acid
  MISC_FEATURE (38)..(38): Xaa can be any naturally occurring amino acid
  MISC_FEATURE (40)..(40): Xaa can be any naturally occurring amino acid except Pro or Gly
  MISC_FEATURE (41)..(41): Xaa can be any naturally occurring amino acid except Pro or Gly
  MISC_FEATURE (42)..(42): Xaa can be any naturally occurring amino acid except Pro or Gly
  MISC_FEATURE (43)..(43): Xaa can be any naturally occurring amino acid except Pro or Gly
  MISC_FEATURE (45)..(45): Xaa can be any naturally occurring amino acid
  MISC_FEATURE (46)..(46): Xaa can be any naturally occurring amino acid
  MISC_FEATURE (47)..(47): Xaa can be any naturally occurring amino acid
  MISC_FEATURE (49)..(49): Xaa can be any naturally occurring amino acid except Pro or Gly
  MISC_FEATURE (50)..(50): Xaa can be any naturally occurring amino acid except Pro or Gly
  MISC_FEATURE (51)..(51): Xaa can be any naturally occurring amino acid except Pro or Gly
  MISC_FEATURE (52)..(52): Xaa can be any naturally occurring amino acid except Pro or Gly
  MISC_FEATURE (54)..(54): Xaa can be any naturally occurring amino acid
  MISC_FEATURE (55)..(55): Xaa can be any naturally occurring amino acid
  MISC_FEATURE (56)..(56): Xaa can be any naturally occurring amino acid
  MISC_FEATURE (58)..(58): Xaa can be any naturally occurring amino acid except Pro or Gly
  MISC_FEATURE (59)..(59): Xaa can be any naturally occurring amino acid except Pro or Gly
  MISC_FEATURE (60)..(60): Xaa can be any naturally occurring amino acid except Pro or Gly
  MISC_FEATURE (61)..(61): Xaa can be any naturally occurring amino acid except Pro or Gly
  MISC_FEATURE (63)..(63): Xaa can be any naturally occurring amino acid
  MISC_FEATURE (64)..(64): Xaa can be any naturally occurring amino acid
  MISC_FEATURE (65)..(65): Xaa can be any naturally occurring amino acid
  MISC_FEATURE (67)..(67): Xaa can be any naturally occurring amino acid except Pro or Gly
  MISC_FEATURE (68)..(68): Xaa can be any naturally occurring amino acid except Pro or Gly
  MISC_FEATURE (69)..(69): Xaa can be any naturally occurring amino acid except Pro or Gly
  MISC_FEATURE (70)..(70): Xaa can be any naturally occurring amino acid except Pro or Gly
  MISC_FEATURE (72)..(72): Xaa can be any naturally occurring amino acid
  MISC_FEATURE (73)..(73): Xaa can be any naturally occurring amino acid
  MISC_FEATURE (74)..(74): Xaa can be any naturally occurring amino acid
  MISC_FEATURE (76)..(76): Xaa can be any naturally occurring amino acid except Pro or Gly
  MISC_FEATURE (77)..(77): Xaa can be any naturally occurring amino acid except Pro or Gly
  MISC_FEATURE (78)..(78): Xaa can be any naturally occurring amino acid except Pro or Gly
  MISC_FEATURE (79)..(79): Xaa can be any naturally occurring amino acid except Pro or Gly
  MISC_FEATURE (81)..(81): Xaa can be any naturally occurring amino acid
  MISC_FEATURE (82)..(82): Xaa can be any naturally occurring amino acid
  MISC_FEATURE (83)..(83): Xaa can be any naturally occurring amino acid
  MISC_FEATURE (85)..(85): Xaa can be any naturally occurring amino acid except Pro or Gly
  MISC_FEATURE (86)..(86): Xaa can be any naturally occurring amino acid except Pro or Gly
  MISC_FEATURE (87)..(87): Xaa can be any naturally occurring amino acid except Pro or Gly
  MISC_FEATURE (88)..(88): Xaa can be any naturally occurring amino acid except Pro or Gly
  MISC_FEATURE (90)..(90): Xaa can be any naturally occurring amino acid
  MISC_FEATURE (91)..(1440): May be present or absent in groups of the repeat unit Xaa Xaa Pro Xaa Xaa Xaa Xaa Gly Xaa
  MISC_FEATURE (91)..(91): Xaa can be any naturally occurring amino acid
  MISC_FEATURE (92)..(92): Xaa can be any naturally occurring amino acid
  MISC_FEATURE (94)..(94): Xaa can be any naturally occurring amino acid except Pro or Gly
  MISC_FEATURE (95)..(95): Xaa can be any naturally occurring amino acid except Pro or Gly
  MISC_FEATURE (96)..(96): Xaa can be any naturally occurring amino acid except Pro or Gly
  MISC_FEATURE (97)..(97): Xaa can be any naturally occurring amino acid except Pro or Gly
  MISC_FEATURE (99)..(99): Xaa can be any naturally occurring amino acid
  MISC_FEATURE (100)..(100): Xaa can be any naturally occurring amino acid
  MISC_FEATURE (101)..(101): Xaa can be any naturally occurring amino acid
  MISC_FEATURE (103)..(103): Xaa can be any naturally occurring amino acid except Pro or Gly
  MISC_FEATURE (104)..(104): Xaa can be any naturally occurring amino acid except Pro or Gly
  MISC_FEATURE (105)..(105): Xaa can be any naturally occurring amino acid except Pro or Gly
  MISC_FEATURE (106)..(106): Xaa can be any naturally occurring amino acid except Pro or Gly
  MISC_FEATURE (108)..(108): Xaa can be any naturally occurring amino acid
  MISC_FEATURE (109)..(109): Xaa can be any naturally occurring amino acid
  MISC_FEATURE (110)..(110): Xaa can be any naturally occurring amino acid
  MISC_FEATURE (112)..(112): Xaa can be any naturally occurring amino acid except Pro or Gly
  MISC_FEATURE (113)..(113): Xaa can be any naturally occurring amino acid except Pro or Gly
  MISC_FEATURE (114)..(114): Xaa can be any naturally occurring amino acid except Pro or Gly
  MISC_FEATURE (115)..(115): Xaa can be any naturally occurring amino acid except Pro or Gly
  MISC_FEATURE (117)..(117): Xaa can be any naturally occurring amino acid
  MISC_FEATURE (118)..(118): Xaa can be any naturally occurring amino acid
  MISC_FEATURE (119)..(119): Xaa can be any naturally occurring amino acid
  MISC_FEATURE (121)..(121): Xaa can be any naturally occurring amino acid except Pro or Gly
  MISC_FEATURE (122)..(122): Xaa can be any naturally occurring amino acid except Pro or Gly
  MISC_FEATURE (123)..(123): Xaa can be any naturally occurring amino acid except Pro or Gly
  MISC_FEATURE (124)..(124): Xaa can be any naturally occurring amino acid except Pro or Gly
  MISC_FEATURE (126)..(126): Xaa can be any naturally occurring amino acid
  MISC_FEATURE (127)..(127): Xaa can be any naturally occurring amino acid
  MISC_FEATURE (128)..(128): Xaa can be any naturally occurring amino acid
  MISC_FEATURE (130)..(130): Xaa can be any naturally occurring amino acid except Pro or Gly
  MISC_FEATURE (131)..(131): Xaa can be any naturally occurring amino acid except Pro or Gly
  MISC_FEATURE (132)..(132): Xaa can be any naturally occurring amino acid except Pro or Gly
  MISC_FEATURE (133)..(133): Xaa can be any naturally occurring amino acid except Pro or Gly
  MISC_FEATURE (135)..(135): Xaa can be any naturally occurring amino acid
  MISC_FEATURE (136)..(136): Xaa can be any naturally occurring amino acid
  MISC_FEATURE (137)..(137): Xaa can be any naturally occurring amino acid
  MISC_FEATURE (139)..(139): Xaa can be any naturally occurring amino acid except Pro or Gly
  MISC_FEATURE (140)..(140): Xaa can be any naturally occurring amino acid except Pro or Gly
  MISC_FEATURE (141)..(141): Xaa can be any naturally occurring amino acid except Pro or Gly
  MISC_FEATURE (142)..(142): Xaa can be any naturally occurring amino acid except Pro or Gly
  MISC_FEATURE (144)..(144): Xaa can be any naturally occurring amino acid
  MISC_FEATURE (145)..(145): Xaa can be any naturally occurring amino acid
  MISC_FEATURE (146)..(146): Xaa can be any naturally occurring amino acid
  MISC_FEATURE (148)..(148): Xaa can be any naturally occurring amino acid except Pro or Gly
  MISC_FEATURE (149)..(149): Xaa can be any naturally occurring amino acid except Pro or Gly
  MISC_FEATURE (150)..(150): Xaa can be any naturally occurring amino acid except Pro or Gly
  MISC_FEATURE (151)..(151): Xaa can be any naturally occurring amino acid except Pro or Gly
  MISC_FEATURE (153)..(153): Xaa can be any naturally occurring amino acid
  MISC_FEATURE (154)..(154): Xaa can be any naturally occurring amino acid
  MISC_FEATURE (155)..(155): Xaa can be any naturally occurring amino acid
  MISC_FEATURE (157)..(157): Xaa can be any naturally occurring amino acid except Pro or Gly
  MISC_FEATURE (158)..(158): Xaa can be any naturally occurring amino acid except Pro or Gly
  MISC_FEATURE (159)..(159): Xaa can be any naturally occurring amino acid except Pro or Gly
  MISC_FEATURE (160)..(160): Xaa can be any naturally occurring amino acid except Pro or Gly
  MISC_FEATURE (162)..(162): Xaa can be any naturally occurring amino acid
  MISC_FEATURE (163)..(163): Xaa can be any naturally occurring amino acid
  MISC_FEATURE (164)..(164): Xaa can be any naturally occurring amino acid
  MISC_FEATURE (166)..(166): Xaa can be any naturally occurring amino acid except Pro or Gly
  MISC_FEATURE (167)..(167): Xaa can be any naturally occurring amino acid except Pro or Gly
  MISC_FEATURE (168)..(168): Xaa can be any naturally occurring amino acid except Pro or Gly
  MISC_FEATURE (169)..(169): Xaa can be any naturally occurring amino acid except Pro or Gly
  MISC_FEATURE (171)..(171): Xaa can be any naturally occurring amino acid
  MISC_FEATURE (172)..(172): Xaa can be any naturally occurring amino acid
  MISC_FEATURE (173)..(173): Xaa can be any naturally occurring amino acid
  MISC_FEATURE (175)..(175): Xaa can be any naturally occurring amino acid except Pro or Gly
  MISC_FEATURE (176)..(176): Xaa can be any naturally occurring amino acid except Pro or Gly
  MISC_FEATURE (177)..(177): Xaa can be any naturally occurring amino acid except Pro or Gly
  MISC_FEATURE (178)..(178): Xaa can be any naturally occurring amino acid except Pro or Gly
  MISC_FEATURE (180)..(180): Xaa can be any naturally occurring amino acid
  MISC_FEATURE (181)..(181): Xaa can be any naturally occurring amino acid
  MISC_FEATURE (182)..(182): Xaa can be any naturally occurring amino acid
  MISC_FEATURE (184)..(184): Xaa can be any naturally occurring amino acid except Pro or Gly
  MISC_FEATURE (185)..(185): Xaa can be any naturally occurring amino acid except Pro or Gly
  MISC_FEATURE (186)..(186): Xaa can be any naturally occurring amino acid except Pro or Gly
  MISC_FEATURE (187)..(187): Xaa can be any naturally occurring amino acid except Pro or Gly
  MISC_FEATURE (189)..(189): Xaa can be any naturally occurring amino acid
  MISC_FEATURE (190)..(190): Xaa can be any naturally occurring amino acid
  MISC_FEATURE (191)..(191): Xaa can be any naturally occurring amino acid
  MISC_FEATURE (193)..(193): Xaa can be any naturally occurring amino acid except Pro or Gly
  MISC_FEATURE (194)..(194): Xaa can be any naturally occurring amino acid except Pro or Gly
  MISC_FEATURE (195)..(195): Xaa can be any naturally occurring amino acid except Pro or Gly
  MISC_FEATURE (196)..(196): Xaa can be any naturally occurring amino acid except Pro or Gly
  MISC_FEATURE (198)..(198): Xaa can be any naturally occurring amino acid
  MISC_FEATURE (199)..(199): Xaa can be any naturally occurring amino acid
  MISC_FEATURE (200)..(200): Xaa can be any naturally occurring amino acid
  MISC_FEATURE (202)..(202): Xaa can be any naturally occurring amino acid except Pro or Gly
  MISC_FEATURE (203)..(203): Xaa can be any naturally occurring amino acid except Pro or Gly
  MISC_FEATURE (204)..(204): Xaa can be any naturally occurring amino acid except Pro or Gly
  MISC_FEATURE (205)..(205): Xaa can be any naturally occurring amino acid except Pro or Gly
  MISC_FEATURE (207)..(207): Xaa can be any naturally occurring amino acid
  MISC_FEATURE (208)..(208): Xaa can be any naturally occurring amino acid
  MISC_FEATURE (209)..(209): Xaa can be any naturally occurring amino acid
  MISC_FEATURE (211)..(211): Xaa can be any naturally occurring amino acid except Pro or Gly
  MISC_FEATURE (212)..(212): Xaa can be any naturally occurring amino acid except Pro or Gly
  MISC_FEATURE (213)..(213): Xaa can be any naturally occurring amino acid except Pro or Gly
  MISC_FEATURE (214)..(214): Xaa can be any naturally occurring amino acid except Pro or Gly
  MISC_FEATURE (216)..(216): Xaa can be any naturally occurring amino acid
  MISC_FEATURE (217)..(217): Xaa can be any naturally occurring amino acid
  MISC_FEATURE (218)..(218): Xaa can be any naturally occurring amino acid
  MISC_FEATURE (220)..(220): Xaa can be any naturally occurring amino acid except Pro or Gly
  MISC_FEATURE (221)..(221): Xaa can be any naturally occurring amino acid except Pro or Gly
  MISC_FEATURE (222)..(222): Xaa can be any naturally occurring amino acid except Pro or Gly
  MISC_FEATURE (223)..(223): Xaa can be any naturally occurring amino acid except Pro or Gly
  MISC_FEATURE (225)..(225): Xaa can be any naturally occurring amino acid
  MISC_FEATURE (226)..(226): Xaa can be any naturally occurring amino acid
  MISC_FEATURE (227)..(227): Xaa can be any naturally occurring amino acid
  MISC_FEATURE (229)..(229): Xaa can be any naturally occurring amino acid except Pro or Gly
  MISC_FEATURE (230)..(230): Xaa can be any naturally occurring amino acid except Pro or Gly
  MISC_FEATURE (231)..(231): Xaa can be any naturally occurring amino acid except Pro or Gly
  MISC_FEATURE (232)..(232): Xaa can be any naturally occurring amino acid except Pro or Gly
  MISC_FEATURE (234)..(234): Xaa can be any naturally occurring amino acid
  MISC_FEATURE (235)..(235): Xaa can be any naturally occurring amino acid
  MISC_FEATURE (236)..(236): Xaa can be any naturally occurring amino acid
  MISC_FEATURE (238)..(238): Xaa can be any naturally occurring amino acid except Pro or Gly
  MISC_FEATURE (239)..(239): Xaa can be any naturally occurring amino acid except Pro or Gly
  MISC_FEATURE (240)..(240): Xaa can be any naturally occurring amino acid except Pro or Gly
  MISC_FEATURE (241)..(241): Xaa can be any naturally occurring amino acid except Pro or Gly
  MISC_FEATURE (243)..(243): Xaa can be any naturally occurring amino acid
  MISC_FEATURE (244)..(244): Xaa can be any naturally occurring amino acid
  MISC_FEATURE (245)..(245): Xaa can be any naturally occurring amino acid
  MISC_FEATURE (247)..(247): Xaa can be any naturally occurring amino acid except Pro or Gly
  MISC_FEATURE (248)..(248): Xaa can be any naturally occurring amino acid except Pro or Gly
  MISC_FEATURE (249)..(249): Xaa can be any naturally occurring amino acid except Pro or Gly
  MISC_FEATURE (250)..(250): Xaa can be any naturally occurring amino acid except Pro or Gly
  MISC_FEATURE (252)..(252): Xaa can be any naturally occurring amino acid
  MISC_FEATURE (253)..(253): Xaa can be any naturally occurring amino acid
  MISC_FEATURE (254)..(254): Xaa can be any naturally occurring amino acid
  MISC_FEATURE (256)..(256): Xaa can be any naturally occurring amino acid except Pro or Gly
  MISC_FEATURE (257)..(257): Xaa can be any naturally occurring amino acid except Pro or Gly
  MISC_FEATURE (258)..(258): Xaa can be any naturally occurring amino acid except Pro or Gly
  MISC_FEATURE (259)..(259): Xaa can be any naturally occurring amino acid except Pro or Gly
  MISC_FEATURE (261)..(261): Xaa can be any naturally occurring amino acid
  MISC_FEATURE (262)..(262): Xaa can be any naturally occurring amino acid
  MISC_FEATURE (263)..(263): Xaa can be any naturally occurring amino acid
  MISC_FEATURE (265)..(265): Xaa can be any naturally occurring amino acid except Pro or Gly
  MISC_FEATURE (266)..(266): Xaa can be any naturally occurring amino acid except Pro or Gly
  MISC_FEATURE (267)..(267): Xaa can be any naturally occurring amino acid except Pro or Gly
  MISC_FEATURE (268)..(268): Xaa can be any naturally occurring amino acid except Pro or Gly
  MISC_FEATURE (270)..(270): Xaa can be any naturally occurring amino acid
  MISC_FEATURE (271)..(271): Xaa can be any naturally occurring amino acid
  MISC_FEATURE (272)..(272): Xaa can be any naturally occurring amino acid
  MISC_FEATURE (274)..(274): Xaa can be any naturally occurring amino acid except Pro or Gly
  MISC_FEATURE (275)..(275): Xaa can be any naturally occurring amino acid except Pro or Gly
  MISC_FEATURE (276)..(276): Xaa can be any naturally occurring amino acid except Pro or Gly
  MISC_FEATURE (277)..(277): Xaa can be any naturally occurring amino acid except Pro or Gly
  MISC_FEATURE (279)..(279): Xaa can be any naturally occurring amino acid
  MISC_FEATURE (280)..(280): Xaa can be any naturally occurring amino acid
  MISC_FEATURE (281)..(281): Xaa can be any naturally occurring amino acid
  MISC_FEATURE (283)..(283): Xaa can be any naturally occurring amino acid except Pro or Gly
  MISC_FEATURE (284)..(284): Xaa can be any naturally occurring amino acid except Pro or Gly
  MISC_FEATURE (285)..(285): Xaa can be any naturally occurring amino acid except Pro or Gly
  MISC_FEATURE (286)..(286): Xaa can be any naturally occurring amino acid except Pro or Gly
  MISC_FEATURE (288)..(288): Xaa can be any naturally occurring amino acid
  MISC_FEATURE (289)..(289): Xaa can be any naturally occurring amino acid
  MISC_FEATURE (290)..(290): Xaa can be any naturally occurring amino acid
  MISC_FEATURE (292)..(292): Xaa can be any naturally occurring amino acid except Pro or Gly
  MISC_FEATURE (293)..(293): Xaa can be any naturally occurring amino acid except Pro or Gly
  MISC_FEATURE (294)..(294): Xaa can be any naturally occurring amino acid except Pro or Gly
  MISC_FEATURE (295)..(295): Xaa can be any naturally occurring amino acid except Pro or Gly
  MISC_FEATURE (297)..(297): Xaa can be any naturally occurring amino acid
  MISC_FEATURE (298)..(298): Xaa can be any naturally occurring amino acid
  MISC_FEATURE (299)..(299): Xaa can be any naturally occurring amino acid
  MISC_FEATURE (301)..(301): Xaa can be any naturally occurring amino acid except Pro or Gly
  MISC_FEATURE (302)..(302): Xaa can be any naturally occurring amino acid except Pro or Gly
  MISC_FEATURE (303)..(303): Xaa can be any naturally occurring amino acid except Pro or Gly
  MISC_FEATURE (304)..(304): Xaa can be any naturally occurring amino acid except Pro or Gly
  MISC_FEATURE (306)..(306): Xaa can be any naturally occurring amino acid
  MISC_FEATURE (307)..(307): Xaa can be any naturally occurring amino acid
  MISC_FEATURE (308)..(308): Xaa can be any naturally occurring amino acid
  MISC_FEATURE (310)..(310): Xaa can be any naturally occurring amino acid except Pro or Gly
  MISC_FEATURE (311)..(311): Xaa can be any naturally occurring amino acid except Pro or Gly
  MISC_FEATURE (312)..(312): Xaa can be any naturally occurring amino acid except Pro or Gly
  MISC_FEATURE (313)..(313): Xaa can be any naturally occurring amino acid except Pro or Gly
  MISC_FEATURE (315)..(315): Xaa can be any naturally occurring amino acid
  MISC_FEATURE (316)..(316): Xaa can be any naturally occurring amino acid
  MISC_FEATURE (317)..(317): Xaa can be any naturally occurring amino acid
  MISC_FEATURE (319)..(319): Xaa can be any naturally occurring amino acid except Pro or Gly
  MISC_FEATURE (320)..(320): Xaa can be any naturally occurring amino acid except Pro or Gly
  MISC_FEATURE (321)..(321): Xaa can be any naturally occurring amino acid except Pro or Gly
  MISC_FEATURE (322)..(322): Xaa can be any naturally occurring amino acid except Pro or Gly
  MISC_FEATURE (324)..(324): Xaa can be any naturally occurring amino acid
  MISC_FEATURE (325)..(325): Xaa can be any naturally occurring amino acid
  MISC_FEATURE (326)..(326): Xaa can be any naturally occurring amino acid
  MISC_FEATURE (328)..(328): Xaa can be any naturally occurring amino acid except Pro or Gly
  MISC_FEATURE (329)..(329): Xaa can be any naturally occurring amino acid except Pro or Gly
  MISC_FEATURE (330)..(330): Xaa can be any naturally occurring amino acid except Pro or Gly
  MISC_FEATURE (331)..(331): Xaa can be any naturally occurring amino acid except Pro or Gly
  MISC_FEATURE (333)..(333): Xaa can be any naturally occurring amino acid
  MISC_FEATURE (334)..(334): Xaa can be any naturally occurring amino acid
  MISC_FEATURE (335)..(335): Xaa can be any naturally occurring amino acid
  MISC_FEATURE (337)..(337): Xaa can be any naturally occurring amino acid except Pro or Gly
  MISC_FEATURE (338)..(338): Xaa can be any naturally occurring amino acid except Pro or Gly
  MISC_FEATURE (339)..(339): Xaa can be any naturally occurring amino acid except Pro or Gly
  MISC_FEATURE (340)..(340): Xaa can be any naturally occurring amino acid except Pro or Gly
  MISC_FEATURE (342)..(342): Xaa can be any naturally occurring amino acid
  MISC_FEATURE (343)..(343): Xaa can be any naturally occurring amino acid
  MISC_FEATURE (344)..(344): Xaa can be any naturally occurring amino acid
  MISC_FEATURE (346)..(346): Xaa can be any naturally occurring amino acid except Pro or Gly
  MISC_FEATURE (347)..(347): Xaa can be any naturally occurring amino acid except Pro or Gly
  MISC_FEATURE (348)..(348): Xaa can be any naturally occurring amino acid except Pro or Gly
  MISC_FEATURE (349)..(349): Xaa can be any naturally occurring amino acid except Pro or Gly
  MISC_FEATURE (351)..(351): Xaa can be any naturally occurring amino acid
  MISC_FEATURE (352)..(352): Xaa can be any naturally occurring amino acid
  MISC_FEATURE (353)..(353): Xaa can be any naturally occurring amino acid
  MISC_FEATURE (355)..(355): Xaa can be any naturally occurring amino acid except Pro or Gly
  MISC_FEATURE (356)..(356): Xaa can be any naturally occurring amino acid except Pro or Gly
  MISC_FEATURE (357)..(357): Xaa can be any naturally occurring amino acid except Pro or Gly
  MISC_FEATURE (358)..(358): Xaa can be any naturally occurring amino acid except Pro or Gly
  MISC_FEATURE (360)..(360): Xaa can be any naturally occurring amino acid
  MISC_FEATURE (361)..(361): Xaa can be any naturally occurring amino acid
  MISC_FEATURE (362)..(362): Xaa can be any naturally occurring amino acid
  MISC_FEATURE (364)..(364): Xaa can be any naturally occurring amino acid except Pro or Gly
  MISC_FEATURE (365)..(365): Xaa can be any naturally occurring amino acid except Pro or Gly
  MISC_FEATURE (366)..(366): Xaa can be any naturally occurring amino acid except Pro or Gly
  MISC_FEATURE (367)..(367): Xaa can be any naturally occurring amino acid except Pro or Gly
  MISC_FEATURE (369)..(369): Xaa can be any naturally occurring amino acid
  MISC_FEATURE (370)..(370): Xaa can be any naturally occurring amino acid
  MISC_FEATURE (371)..(371): Xaa can be any naturally occurring amino acid
  MISC_FEATURE (373)..(373): Xaa can be any naturally occurring amino acid except Pro or Gly
  MISC_FEATURE (374)..(374): Xaa can be any naturally occurring amino acid except Pro or Gly
  MISC_FEATURE (375)..(375): Xaa can be any naturally occurring amino acid except Pro or Gly
  MISC_FEATURE (376)..(376): Xaa can be any naturally occurring amino acid except Pro or Gly
  MISC_FEATURE (378)..(378): Xaa can be any naturally occurring amino acid
  MISC_FEATURE (379)..(379): Xaa can be any naturally occurring amino acid
  MISC_FEATURE (380)..(380): Xaa can be any naturally occurring amino acid
  MISC_FEATURE (382)..(382): Xaa can be any naturally occurring amino acid except Pro or Gly
  MISC_FEATURE (383)..(383): Xaa can be any naturally occurring amino acid except Pro or Gly
  MISC_FEATURE (384)..(384): Xaa can be any naturally occurring amino acid except Pro or Gly
  MISC_FEATURE (385)..(385): Xaa can be any naturally occurring amino acid except Pro or Gly
  MISC_FEATURE (387)..(387): Xaa can be any naturally occurring amino acid
  MISC_FEATURE (388)..(388): Xaa can be any naturally occurring amino acid
  MISC_FEATURE (389)..(389): Xaa can be any naturally occurring amino acid
  MISC_FEATURE (391)..(391): Xaa can be any naturally occurring amino acid except Pro or Gly
  MISC_FEATURE (392)..(392): Xaa can be any naturally occurring amino acid except Pro or Gly
  MISC_FEATURE (393)..(393): Xaa can be any naturally occurring amino acid except Pro or Gly
  MISC_FEATURE (394)..(394): Xaa can be any naturally occurring amino acid except Pro or Gly
  MISC_FEATURE (396)..(396): Xaa can be any naturally occurring amino acid
  MISC_FEATURE (397)..(397): Xaa can be any naturally occurring amino acid
  MISC_FEATURE (398)..(398): Xaa can be any naturally occurring amino acid
  MISC_FEATURE (400)..(400): Xaa can be any naturally occurring amino acid except Pro or Gly
  MISC_FEATURE (401)..(401): Xaa can be any naturally occurring amino acid except Pro or Gly
  MISC_FEATURE (402)..(402): Xaa can be any naturally occurring amino acid except Pro or Gly
  MISC_FEATURE (403)..(403): Xaa can be any naturally occurring amino acid except Pro or Gly
  MISC_FEATURE (405)..(405): Xaa can be any naturally occurring amino acid
  MISC_FEATURE (406)..(406): Xaa can be any naturally occurring amino acid
  MISC_FEATURE (407)..(407): Xaa can be any naturally occurring amino acid
  MISC_FEATURE (409)..(409): Xaa can be any naturally occurring amino acid except Pro or Gly
  MISC_FEATURE (410)..(410): Xaa can be any naturally occurring amino acid except Pro or Gly
  MISC_FEATURE (411)..(411): Xaa can be any naturally occurring amino acid except Pro or Gly
  MISC_FEATURE (412)..(412): Xaa can be any naturally occurring amino acid except Pro or Gly
  MISC_FEATURE (414)..(414): Xaa can be any naturally occurring amino acid
  MISC_FEATURE (415)..(415): Xaa can be any naturally occurring amino acid
  MISC_FEATURE (416)..(416): Xaa can be any naturally occurring amino acid
  MISC_FEATURE (418)..(418): Xaa can be any naturally occurring amino acid except Pro or Gly
  MISC_FEATURE (419)..(419): Xaa can be any naturally occurring amino acid except Pro or Gly
  MISC_FEATURE (420)..(420): Xaa can be any naturally occurring amino acid except Pro or Gly
  MISC_FEATURE (421)..(421): Xaa can be any naturally occurring amino acid except Pro or Gly
  MISC_FEATURE (423)..(423): Xaa can be any naturally occurring amino acid
  MISC_FEATURE (424)..(424): Xaa can be any naturally occurring amino acid
  MISC_FEATURE (425)..(425): Xaa can be any naturally occurring amino acid
  MISC_FEATURE (427)..(427): Xaa can be any naturally occurring amino acid except Pro or Gly
  MISC_FEATURE (428)..(428): Xaa can be any naturally occurring amino acid except Pro or Gly
  MISC_FEATURE (429)..(429): Xaa can be any naturally occurring amino acid except Pro or Gly
  MISC_FEATURE (430)..(430): Xaa can be any naturally occurring amino acid except Pro or Gly
  MISC_FEATURE (432)..(432): Xaa can be any naturally occurring amino acid
  MISC_FEATURE (433)..(433): Xaa can be any naturally occurring amino acid
  MISC_FEATURE (434)..(434): Xaa can be any naturally occurring amino acid
  MISC_FEATURE (436)..(436): Xaa can be any naturally occurring amino acid except Pro or Gly
  MISC_FEATURE (437)..(437): Xaa can be any naturally occurring amino acid except Pro or Gly
  MISC_FEATURE (438)..(438): Xaa can be any naturally occurring amino acid except Pro or Gly
  MISC_FEATURE (439)..(439): Xaa can be any naturally occurring amino acid except Pro or Gly
  MISC_FEATURE (441)..(441): Xaa can be any naturally occurring amino acid
  MISC_FEATURE (442)..(442): Xaa can be any naturally occurring amino acid
  MISC_FEATURE (443)..(443): Xaa can be any naturally occurring amino acid
  MISC_FEATURE (445)..(445): Xaa can be any naturally occurring amino acid except Pro or Gly
  MISC_FEATURE (446)..(446): Xaa can be any naturally occurring amino acid except Pro or Gly
  MISC_FEATURE (447)..(447): Xaa can be any naturally occurring amino acid except Pro or Gly
  MISC_FEATURE (448)..(448): Xaa can be any naturally occurring amino acid except Pro or Gly
  MISC_FEATURE (450)..(450): Xaa can be any naturally occurring amino acid
  MISC_FEATURE (451)..(451): Xaa can be any naturally occurring amino acid
  MISC_FEATURE (452)..(452): Xaa can be any naturally occurring amino acid
  MISC_FEATURE (454)..(454): Xaa can be any naturally occurring amino acid except Pro or Gly
  MISC_FEATURE (455)..(455): Xaa can be any naturally occurring amino acid except Pro or Gly
  MISC_FEATURE (456)..(456): Xaa can be any naturally occurring amino acid except Pro or Gly
  MISC_FEATURE (457)..(457): Xaa can be any naturally occurring amino acid except Pro or Gly
  MISC_FEATURE (459)..(459): Xaa can be any naturally occurring amino acid
  MISC_FEATURE (460)..(460): Xaa can be any naturally occurring amino acid
  MISC_FEATURE (461)..(461): Xaa can be any naturally occurring amino acid
  MISC_FEATURE (463)..(463): Xaa can be any naturally occurring amino acid except Pro or Gly
  MISC_FEATURE (464)..(464): Xaa can be any naturally occurring amino acid except Pro or Gly
  MISC_FEATURE (465)..(465): Xaa can be any naturally occurring amino acid except Pro or Gly
  MISC_FEATURE (466)..(466): Xaa can be any naturally occurring amino acid except Pro or Gly
  MISC_FEATURE (468)..(468): Xaa can be any naturally occurring amino acid
  MISC_FEATURE (469)..(469): Xaa can be any naturally occurring amino acid
  MISC_FEATURE (470)..(470): Xaa can be any naturally occurring amino acid
  MISC_FEATURE (472)..(472): Xaa can be any naturally occurring amino acid except Pro or Gly
  MISC_FEATURE (473)..(473): Xaa can be any naturally occurring amino acid except Pro or Gly
  MISC_FEATURE (474)..(474): Xaa can be any naturally occurring amino acid except Pro or Gly
  MISC_FEATURE (475)..(475): Xaa can be any naturally occurring amino acid except Pro or Gly
  MISC_FEATURE (477)..(477): Xaa can be any naturally occurring amino acid
  MISC_FEATURE (478)..(478): Xaa can be any naturally occurring amino acid
  MISC_FEATURE (479)..(479): Xaa can be any naturally occurring amino acid
  MISC_FEATURE (481)..(481): Xaa can be any naturally occurring amino acid except Pro or Gly
  MISC_FEATURE (482)..(482): Xaa can be any naturally occurring amino acid except Pro or Gly
  MISC_FEATURE (483)..(483): Xaa can be any naturally occurring amino acid except Pro or Gly
  MISC_FEATURE (484)..(484): Xaa can be any naturally occurring amino acid except Pro or Gly
  MISC_FEATURE (486)..(486): Xaa can be any naturally occurring amino acid
  MISC_FEATURE (487)..(487): Xaa can be any naturally occurring amino acid
  MISC_FEATURE (488)..(488): Xaa can be any naturally occurring amino acid
  MISC_FEATURE (490)..(490): Xaa can be any naturally occurring amino acid except Pro or Gly
  MISC_FEATURE (491)..(491): Xaa can be any naturally occurring amino acid except Pro or Gly
  MISC_FEATURE (492)..(492): Xaa can be any naturally occurring amino acid except Pro or Gly
  MISC_FEATURE (493)..(493): Xaa can be any naturally occurring amino acid except Pro or Gly
  MISC_FEATURE (495)..(495): Xaa can be any naturally occurring amino acid
  MISC_FEATURE (496)..(496): Xaa can be any naturally occurring amino acid
  MISC_FEATURE (497)..(497): Xaa can be any naturally occurring amino acid
  MISC_FEATURE (499)..(499): Xaa can be any naturally occurring amino acid except Pro or Gly
  MISC_FEATURE (500)..(500): Xaa can be any naturally occurring amino acid except Pro or Gly
  MISC_FEATURE (501)..(501): Xaa can be any naturally occurring amino acid except Pro or Gly
  MISC_FEATURE (502)..(502): Xaa can be any naturally occurring amino acid except Pro or Gly
  MISC_FEATURE (504)..(504): Xaa can be any naturally occurring amino acid
  MISC_FEATURE (505)..(505): Xaa can be any naturally occurring amino acid
  MISC_FEATURE (506)..(506): Xaa can be any naturally occurring amino acid
  MISC_FEATURE (508)..(508): Xaa can be any naturally occurring amino acid except Pro or Gly
  MISC_FEATURE (509)..(509): Xaa can be any naturally occurring amino acid except Pro or Gly
  MISC_FEATURE (510)..(510): Xaa can be any naturally occurring amino acid except Pro or Gly
  MISC_FEATURE (511)..(511): Xaa can be any naturally occurring amino acid except Pro or Gly
  MISC_FEATURE (513)..(513): Xaa can be any naturally occurring amino acid
  MISC_FEATURE (514)..(514): Xaa can be any naturally occurring amino acid
  MISC_FEATURE (515)..(515): Xaa can be any naturally occurring amino acid
  MISC_FEATURE (517)..(517): Xaa can be any naturally occurring amino acid except Pro or Gly
  MISC_FEATURE (518)..(518): Xaa can be any naturally occurring amino acid except Pro or Gly
  MISC_FEATURE (519)..(519): Xaa can be any naturally occurring amino acid except Pro or Gly
  MISC_FEATURE (520)..(520): Xaa can be any naturally occurring amino acid except Pro or Gly
  MISC_FEATURE (522)..(522): Xaa can be any naturally occurring amino acid
  MISC_FEATURE (523)..(523): Xaa can be any naturally occurring amino acid
  MISC_FEATURE (524)..(524): Xaa can be any naturally occurring amino acid
  MISC_FEATURE (526)..(526): Xaa can be any naturally occurring amino acid except Pro or Gly
  MISC_FEATURE (527)..(527): Xaa can be any naturally occurring amino acid except Pro or Gly
  MISC_FEATURE (528)..(528): Xaa can be any naturally occurring amino acid except Pro or Gly
  MISC_FEATURE (529)..(529): Xaa can be any naturally occurring amino acid except Pro or Gly
  MISC_FEATURE (531)..(531): Xaa can be any naturally occurring amino acid
  MISC_FEATURE (532)..(532): Xaa can be any naturally occurring amino acid
  MISC_FEATURE (533)..(533): Xaa can be any naturally occurring amino acid
  MISC_FEATURE (535)..(535): Xaa can be any naturally occurring amino acid except Pro or Gly
  MISC_FEATURE (536)..(536): Xaa can be any naturally occurring amino acid except Pro or Gly
  MISC_FEATURE (537)..(537): Xaa can be any naturally occurring amino acid except Pro or Gly
  MISC_FEATURE (538)..(538): Xaa can be any naturally occurring amino acid except Pro or Gly
  MISC_FEATURE (540)..(540): Xaa can be any naturally occurring amino acid
  MISC_FEATURE (541)..(541): Xaa can be any naturally occurring amino acid
  MISC_FEATURE (542)..(542): Xaa can be any naturally occurring amino acid
  MISC_FEATURE (544)..(544): Xaa can be any naturally occurring amino acid except Pro or Gly
  MISC_FEATURE (545)..(545): Xaa can be any naturally occurring amino acid except Pro or Gly
  MISC_FEATURE (546)..(546): Xaa can be any naturally occurring amino acid except Pro or Gly
  MISC_FEATURE (547)..(547): Xaa can be any naturally occurring amino acid except Pro or Gly
  MISC_FEATURE (549)..(549): Xaa can be any naturally occurring amino acid
  MISC_FEATURE (550)..(550): Xaa can be any naturally occurring amino acid
  MISC_FEATURE (551)..(551): Xaa can be any naturally occurring amino acid
  MISC_FEATURE (553)..(553): Xaa can be any naturally occurring amino acid except Pro or Gly
  MISC_FEATURE (554)..(554): Xaa can be any naturally occurring amino acid except Pro or Gly
  MISC_FEATURE (555)..(555): Xaa can be any naturally occurring amino acid except Pro or Gly
  MISC_FEATURE (556)..(556): Xaa can be any naturally occurring amino acid except Pro or Gly
  MISC_FEATURE (558)..(558): Xaa can be any naturally occurring amino acid
  MISC_FEATURE (559)..(559): Xaa can be any naturally occurring amino acid
  MISC_FEATURE (560)..(560): Xaa can be any naturally occurring amino acid
  MISC_FEATURE (562)..(562): Xaa can be any naturally occurring amino acid except Pro or Gly
  MISC_FEATURE (563)..(563): Xaa can be any naturally occurring amino acid except Pro or Gly
  MISC_FEATURE (564)..(564): Xaa can be any naturally occurring amino acid except Pro or Gly
  MISC_FEATURE (565)..(565): Xaa can be any naturally occurring amino acid except Pro or Gly
  MISC_FEATURE (567)..(567): Xaa can be any naturally occurring amino acid
  MISC_FEATURE (568)..(568): Xaa can be any naturally occurring amino acid
  MISC_FEATURE (569)..(569): Xaa can be any naturally occurring amino acid
  MISC_FEATURE (571)..(571): Xaa can be any naturally occurring amino acid except Pro or Gly
  MISC_FEATURE (572)..(572): Xaa can be any naturally occurring amino acid except Pro or Gly
  MISC_FEATURE (573)..(573): Xaa can be any naturally occurring amino acid except Pro or Gly
  MISC_FEATURE (574)..(574): Xaa can be any naturally occurring amino acid except Pro or Gly
  MISC_FEATURE (576)..(576): Xaa can be any naturally occurring amino acid
  MISC_FEATURE (577)..(577): Xaa can be any naturally occurring amino acid
  MISC_FEATURE (578)..(578): Xaa can be any naturally occurring amino acid
  MISC_FEATURE (580)..(580): Xaa can be any naturally occurring amino acid except Pro or Gly
  MISC_FEATURE (581)..(581): Xaa can be any naturally occurring amino acid except Pro or Gly
  MISC_FEATURE (582)..(582): Xaa can be any naturally occurring amino acid except Pro or Gly
  MISC_FEATURE (583)..(583): Xaa can be any naturally occurring amino acid except Pro or Gly
  MISC_FEATURE (585)..(585): Xaa can be any naturally occurring amino acid
  MISC_FEATURE (586)..(586): Xaa can be any naturally occurring amino acid
  MISC_FEATURE (587)..(587): Xaa can be any naturally occurring amino acid
  MISC_FEATURE (589)..(589): Xaa can be any naturally occurring amino acid except Pro or Gly
  MISC_FEATURE (590)..(590): Xaa can be any naturally occurring amino acid except Pro or Gly
  MISC_FEATURE (591)..(591): Xaa can be any naturally occurring amino acid except Pro or Gly
  MISC_FEATURE (592)..(592): Xaa can be any naturally occurring amino acid except Pro or Gly
  MISC_FEATURE (594)..(594): Xaa can be any naturally occurring amino acid
  MISC_FEATURE (595)..(595): Xaa can be any naturally occurring amino acid
  MISC_FEATURE (596)..(596): Xaa can be any naturally occurring amino acid
  MISC_FEATURE (598)..(598): Xaa can be any naturally occurring amino acid except Pro or Gly
  MISC_FEATURE (599)..(599): Xaa can be any naturally occurring amino acid except Pro or Gly
  MISC_FEATURE (600)..(600): Xaa can be any naturally occurring amino acid except Pro or Gly
  MISC_FEATURE (601)..(601): Xaa can be any naturally occurring amino acid except Pro or Gly
  MISC_FEATURE (603)..(603): Xaa can be any naturally occurring amino acid
  MISC_FEATURE (604)..(604): Xaa can be any naturally occurring amino acid
  MISC_FEATURE (605)..(605): Xaa can be any naturally occurring amino acid
  MISC_FEATURE (607)..(607): Xaa can be any naturally occurring amino acid except Pro or Gly
  MISC_FEATURE (608)..(608): Xaa can be any naturally occurring amino acid except Pro or Gly
  MISC_FEATURE (609)..(609): Xaa can be any naturally occurring amino acid except Pro or Gly
  MISC_FEATURE (610)..(610): Xaa can be any naturally occurring amino acid except Pro or Gly
  MISC_FEATURE (612)..(612): Xaa can be any naturally occurring amino acid
  MISC_FEATURE (613)..(613): Xaa can be any naturally occurring amino acid
  MISC_FEATURE (614)..(614): Xaa can be any naturally occurring amino acid
  MISC_FEATURE (616)..(616): Xaa can be any naturally occurring amino acid except Pro or Gly
  MISC_FEATURE (617)..(617): Xaa can be any naturally occurring amino acid except Pro or Gly
  MISC_FEATURE (618)..(618): Xaa can be any naturally occurring amino acid except Pro or Gly
  MISC_FEATURE (619)..(619): Xaa can be any naturally occurring amino acid except Pro or Gly
  MISC_FEATURE (621)..(621): Xaa can be any naturally occurring amino acid
  MISC_FEATURE (622)..(622): Xaa can be any naturally occurring amino acid
  MISC_FEATURE (623)..(623): Xaa can be any naturally occurring amino acid
  MISC_FEATURE (625)..(625): Xaa can be any naturally occurring amino acid except Pro or Gly
  MISC_FEATURE (626)..(626): Xaa can be any naturally occurring amino acid except Pro or Gly
  MISC_FEATURE (627)..(627): Xaa can be any naturally occurring amino acid except Pro or Gly
  MISC_FEATURE (628)..(628): Xaa can be any naturally occurring amino acid except Pro or Gly
  MISC_FEATURE (630)..(630): Xaa can be any naturally occurring amino acid
  MISC_FEATURE (631)..(631): Xaa can be any naturally occurring amino acid
  MISC_FEATURE (632)..(632): Xaa can be any naturally occurring amino acid
  MISC_FEATURE (634)..(634): Xaa can be any naturally occurring amino acid except Pro or Gly
  MISC_FEATURE (635)..(635): Xaa can be any naturally occurring amino acid except Pro or Gly
  MISC_FEATURE (636)..(636): Xaa can be any naturally occurring amino acid except Pro or Gly
  MISC_FEATURE (637)..(637): Xaa can be any naturally occurring amino acid except Pro or Gly
  MISC_FEATURE (639)..(639): Xaa can be any naturally occurring amino acid
  MISC_FEATURE (640)..(640): Xaa can be any naturally occurring amino acid
  MISC_FEATURE (641)..(641): Xaa can be any naturally occurring amino acid
  MISC_FEATURE (643)..(643): Xaa can be any naturally occurring amino acid except Pro or Gly
  MISC_FEATURE (644)..(644): Xaa can be any naturally occurring amino acid except Pro or Gly
  MISC_FEATURE (645)..(645): Xaa can be any naturally occurring amino acid except Pro or Gly
  MISC_FEATURE (646)..(646): Xaa can be any naturally occurring amino acid except Pro or Gly
  MISC_FEATURE (648)..(648): Xaa can be any naturally occurring amino acid
  MISC_FEATURE (649)..(649): Xaa can be any naturally occurring amino acid
  MISC_FEATURE (650)..(650): Xaa can be any naturally occurring amino acid
  MISC_FEATURE (652)..(652): Xaa can be any naturally occurring amino acid except Pro or Gly
  MISC_FEATURE (653)..(653): Xaa can be any naturally occurring amino acid except Pro or Gly
  MISC_FEATURE (654)..(654): Xaa can be any naturally occurring amino acid except Pro or Gly
  MISC_FEATURE (655)..(655): Xaa can be any naturally occurring amino acid except Pro or Gly
  MISC_FEATURE (657)..(657): Xaa can be any naturally occurring amino acid
  MISC_FEATURE (658)..(658): Xaa can be any naturally occurring amino acid
  MISC_FEATURE (659)..(659): Xaa can be any naturally occurring amino acid
  MISC_FEATURE (661)..(661): Xaa can be any naturally occurring amino acid except Pro or Gly
  MISC_FEATURE (662)..(662): Xaa can be any naturally occurring amino acid except Pro or Gly
  MISC_FEATURE (663)..(663): Xaa can be any naturally occurring amino acid except Pro or Gly
  MISC_FEATURE (664)..(664): Xaa can be any naturally occurring amino acid except Pro or Gly
  MISC_FEATURE (666)..(666): Xaa can be any naturally occurring amino acid
  MISC_FEATURE (667)..(667): Xaa can be any naturally occurring amino acid
  MISC_FEATURE (668)..(668): Xaa can be any naturally occurring amino acid
  MISC_FEATURE (670)..(670): Xaa can be any naturally occurring amino acid except Pro or Gly
  MISC_FEATURE (671)..(671): Xaa can be any naturally occurring amino acid except Pro or Gly
  MISC_FEATURE (672)..(672): Xaa can be any naturally occurring amino acid except Pro or Gly
  MISC_FEATURE (673)..(673): Xaa can be any naturally occurring amino acid except Pro or Gly
  MISC_FEATURE (675)..(675): Xaa can be any naturally occurring amino acid
  MISC_FEATURE (676)..(676): Xaa can be any naturally occurring amino acid
  MISC_FEATURE (677)..(677): Xaa can be any naturally occurring amino acid
  MISC_FEATURE (679)..(679): Xaa can be any naturally occurring amino acid except Pro or Gly
  MISC_FEATURE (680)..(680): Xaa can be any naturally occurring amino acid except Pro or Gly
  MISC_FEATURE (681)..(681): Xaa can be any naturally occurring amino acid except Pro or Gly
  MISC_FEATURE (682)..(682): Xaa can be any naturally occurring amino acid except Pro or Gly
  MISC_FEATURE (684)..(684): Xaa can be any naturally occurring amino acid
  MISC_FEATURE (685)..(685): Xaa can be any naturally occurring amino acid
  MISC_FEATURE (686)..(686): Xaa can be any naturally occurring amino acid
  MISC_FEATURE (688)..(688): Xaa can be any naturally occurring amino acid except Pro or Gly
  MISC_FEATURE (689)..(689): Xaa can be any naturally occurring amino acid except Pro or Gly
  MISC_FEATURE (690)..(690): Xaa can be any naturally occurring amino acid except Pro or Gly
  MISC_FEATURE (691)..(691): Xaa can be any naturally occurring amino acid except Pro or Gly
  MISC_FEATURE (693)..(693): Xaa can be any naturally occurring amino acid
  MISC_FEATURE (694)..(694): Xaa can be any naturally occurring amino acid
  MISC_FEATURE (695)..(695): Xaa can be any naturally occurring amino acid
  MISC_FEATURE (697)..(697): Xaa can be any naturally occurring amino acid except Pro or Gly
  MISC_FEATURE (698)..(698): Xaa can be any naturally occurring amino acid except Pro or Gly
  MISC_FEATURE (699)..(699): Xaa can be any naturally occurring amino acid except Pro or Gly
  MISC_FEATURE (700)..(700): Xaa can be any naturally occurring amino acid except Pro or Gly
  MISC_FEATURE (702)..(702): Xaa can be any naturally occurring amino acid
  MISC_FEATURE (703)..(703): Xaa can be any naturally occurring amino acid
  MISC_FEATURE (704)..(704): Xaa can be any naturally occurring amino acid
  MISC_FEATURE (706)..(706): Xaa can be any naturally occurring amino acid except Pro or Gly
  MISC_FEATURE (707)..(707): Xaa can be any naturally occurring amino acid except Pro or Gly
  MISC_FEATURE (708)..(708): Xaa can be any naturally occurring amino acid except Pro or Gly
  MISC_FEATURE (709)..(709): Xaa can be any naturally occurring amino acid except Pro or Gly
  MISC_FEATURE (711)..(711): Xaa can be any naturally occurring amino acid
  MISC_FEATURE (712)..(712): Xaa can be any naturally occurring amino acid
  MISC_FEATURE (713)..(713): Xaa can be any naturally occurring amino acid
  MISC_FEATURE (715)..(715): Xaa can be any naturally occurring amino acid except Pro or Gly
  MISC_FEATURE (716)..(716): Xaa can be any naturally occurring amino acid except Pro or Gly
  MISC_FEATURE (717)..(717): Xaa can be any naturally occurring amino acid except Pro or Gly
  MISC_FEATURE (718)..(718): Xaa can be any naturally occurring amino acid except Pro or Gly
  MISC_FEATURE (720)..(720): Xaa can be any naturally occurring amino acid
  MISC_FEATURE (721)..(721): Xaa can be any naturally occurring amino acid
  MISC_FEATURE (722)..(722): Xaa can be any naturally occurring amino acid
  MISC_FEATURE (724)..(724): Xaa can be any naturally occurring amino acid except Pro or Gly
  MISC_FEATURE (725)..(725): Xaa can be any naturally occurring amino acid except Pro or Gly
  MISC_FEATURE (726)..(726): Xaa can be any naturally occurring amino acid except Pro or Gly
  MISC_FEATURE (727)..(727): Xaa can be any naturally occurring amino acid except Pro or Gly
  MISC_FEATURE (729)..(729): Xaa can be any naturally occurring amino acid
  MISC_FEATURE (730)..(730): Xaa can be any naturally occurring amino acid
  MISC_FEATURE (731)..(731): Xaa can be any naturally occurring amino acid
  MISC_FEATURE (733)..(733): Xaa can be any naturally occurring amino acid except Pro or Gly
  MISC_FEATURE (734)..(734): Xaa can be any naturally occurring amino acid except Pro or Gly
  MISC_FEATURE (735)..(735): Xaa can be any naturally occurring amino acid except Pro or Gly
  MISC_FEATURE (736)..(736): Xaa can be any naturally occurring amino acid except Pro or Gly
  MISC_FEATURE (738)..(738): Xaa can be any naturally occurring amino acid
  MISC_FEATURE (739)..(739): Xaa can be any naturally occurring amino acid
  MISC_FEATURE (740)..(740): Xaa can be any naturally occurring amino acid
  MISC_FEATURE (742)..(742): Xaa can be any naturally occurring amino acid except Pro or Gly
  MISC_FEATURE (743)..(743): Xaa can be any naturally occurring amino acid except Pro or Gly
  MISC_FEATURE (744)..(744): Xaa can be any naturally occurring amino acid except Pro or Gly
  MISC_FEATURE (745)..(745): Xaa can be any naturally occurring amino acid except Pro or Gly
  MISC_FEATURE (747)..(747): Xaa can be any naturally occurring amino acid
  MISC_FEATURE (748)..(748): Xaa can be any naturally occurring amino acid
  MISC_FEATURE (749)..(749): Xaa can be any naturally occurring amino acid
  MISC_FEATURE (751)..(751): Xaa can be any naturally occurring amino acid except Pro or Gly
  MISC_FEATURE (752)..(752): Xaa can be any naturally occurring amino acid except Pro or Gly
  MISC_FEATURE (753)..(753): Xaa can be any naturally occurring amino acid except Pro or Gly
  MISC_FEATURE (754)..(754): Xaa can be any naturally occurring amino acid except Pro or Gly
  MISC_FEATURE (756)..(756): Xaa can be any naturally occurring amino acid
  MISC_FEATURE (757)..(757): Xaa can be any naturally occurring amino acid
  MISC_FEATURE (758)..(758): Xaa can be any naturally occurring amino acid
  MISC_FEATURE (760)..(760): Xaa can be any naturally occurring amino acid except Pro or Gly
  MISC_FEATURE (761)..(761): Xaa can be any naturally occurring amino acid except Pro or Gly
  MISC_FEATURE (762)..(762): Xaa can be any naturally occurring amino acid except Pro or Gly
  MISC_FEATURE (763)..(763): Xaa can be any naturally occurring amino acid except Pro or Gly
  MISC_FEATURE (765)..(765): Xaa can be any naturally occurring amino acid
  MISC_FEATURE (766)..(766): Xaa can be any naturally occurring amino acid
  MISC_FEATURE (767)..(767): Xaa can be any naturally occurring amino acid
  MISC_FEATURE (769)..(769): Xaa can be any naturally occurring amino acid except Pro or Gly
  MISC_FEATURE (770)..(770): Xaa can be any naturally occurring amino acid except Pro or Gly
  MISC_FEATURE (771)..(771): Xaa can be any naturally occurring amino acid except Pro or Gly
  MISC_FEATURE (772)..(772): Xaa can be any naturally occurring amino acid except Pro or Gly
  MISC_FEATURE (774)..(774): Xaa can be any naturally occurring amino acid
  MISC_FEATURE (775)..(775): Xaa can be any naturally occurring amino acid
  MISC_FEATURE (776)..(776): Xaa can be any naturally occurring amino acid
  MISC_FEATURE (778)..(778): Xaa can be any naturally occurring amino acid except Pro or Gly
  MISC_FEATURE (779)..(779): Xaa can be any naturally occurring amino acid except Pro or Gly
  MISC_FEATURE (780)..(780): Xaa can be any naturally occurring amino acid except Pro or Gly
  MISC_FEATURE (781)..(781): Xaa can be any naturally occurring amino acid except Pro or Gly
  MISC_FEATURE (783)..(783): Xaa can be any naturally occurring amino acid
  MISC_FEATURE (784)..(784): Xaa can be any naturally occurring amino acid
  MISC_FEATURE (785)..(785): Xaa can be any naturally occurring amino acid
  MISC_FEATURE (787)..(787): Xaa can be any naturally occurring amino acid except Pro or Gly
  MISC_FEATURE (788)..(788): Xaa can be any naturally occurring amino acid except Pro or Gly
  MISC_FEATURE (789)..(789): Xaa can be any naturally occurring amino acid except Pro or Gly
  MISC_FEATURE (790)..(790): Xaa can be any naturally occurring amino acid except Pro or Gly
  MISC_FEATURE (792)..(792): Xaa can be any naturally occurring amino acid
  MISC_FEATURE (793)..(793): Xaa can be any naturally occurring amino acid
  MISC_FEATURE (794)..(794): Xaa can be any naturally occurring amino acid
  MISC_FEATURE (796)..(796): Xaa can be any naturally occurring amino acid except Pro or Gly
  MISC_FEATURE (797)..(797): Xaa can be any naturally occurring amino acid except Pro or Gly
  MISC_FEATURE (798)..(798): Xaa can be any naturally occurring amino acid except Pro or Gly
  MISC_FEATURE (799)..(799): Xaa can be any naturally occurring amino acid except Pro or Gly
  MISC_FEATURE (801)..(801): Xaa can be any naturally occurring amino acid
  MISC_FEATURE (802)..(802): Xaa can be any naturally occurring amino acid
  MISC_FEATURE (803)..(803): Xaa can be any naturally occurring amino acid
  MISC_FEATURE (805)..(805): Xaa can be any naturally occurring amino acid except Pro or Gly
  MISC_FEATURE (806)..(806): Xaa can be any naturally occurring amino acid except Pro or Gly
  MISC_FEATURE (807)..(807): Xaa can be any naturally occurring amino acid except Pro or Gly
  MISC_FEATURE (808)..(808): Xaa can be any naturally occurring amino acid except Pro or Gly
  MISC_FEATURE (810)..(810): Xaa can be any naturally occurring amino acid
  MISC_FEATURE (811)..(811): Xaa can be any naturally occurring amino acid
  MISC_FEATURE (812)..(812): Xaa can be any naturally occurring amino acid
  MISC_FEATURE (814)..(814): Xaa can be any naturally occurring amino acid except Pro or Gly
  MISC_FEATURE (815)..(815): Xaa can be any naturally occurring amino acid except Pro or Gly
  MISC_FEATURE (816)..(816): Xaa can be any naturally occurring amino acid except Pro or Gly
  MISC_FEATURE (817)..(817): Xaa can be any naturally occurring amino acid except Pro or Gly
  MISC_FEATURE (819)..(819): Xaa can be any naturally occurring amino acid
  MISC_FEATURE (820)..(820): Xaa can be any naturally occurring amino acid
  MISC_FEATURE (821)..(821): Xaa can be any naturally occurring amino acid
  MISC_FEATURE (823)..(823): Xaa can be any naturally occurring amino acid except Pro or Gly
  MISC_FEATURE (824)..(824): Xaa can be any naturally occurring amino acid except Pro or Gly
  MISC_FEATURE (825)..(825): Xaa can be any naturally occurring amino acid except Pro or Gly
  MISC_FEATURE (826)..(826): Xaa can be any naturally occurring amino acid except Pro or Gly
  MISC_FEATURE (828)..(828): Xaa can be any naturally occurring amino acid
  MISC_FEATURE (829)..(829): Xaa can be any naturally occurring amino acid
  MISC_FEATURE (830)..(830): Xaa can be any naturally occurring amino acid
  MISC_FEATURE (832)..(832): Xaa can be any naturally occurring amino acid except Pro or Gly
  MISC_FEATURE (833)..(833): Xaa can be any naturally occurring amino acid except Pro or Gly
  MISC_FEATURE (834)..(834): Xaa can be any naturally occurring amino acid except Pro or Gly
  MISC_FEATURE (835)..(835): Xaa can be any naturally occurring amino acid except Pro or Gly
  MISC_FEATURE (837)..(837): Xaa can be any naturally occurring amino acid
  MISC_FEATURE (838)..(838): Xaa can be any naturally occurring amino acid
  MISC_FEATURE (839)..(839): Xaa can be any naturally occurring amino acid
  MISC_FEATURE (841)..(841): Xaa can be any naturally occurring amino acid except Pro or Gly
  MISC_FEATURE (842)..(842): Xaa can be any naturally occurring amino acid except Pro or Gly
  MISC_FEATURE (843)..(843): Xaa can be any naturally occurring amino acid except Pro or Gly
  MISC_FEATURE (844)..(844): Xaa can be any naturally occurring amino acid except Pro or Gly
  MISC_FEATURE (846)..(846): Xaa can be any naturally occurring amino acid
  MISC_FEATURE (847)..(847): Xaa can be any naturally occurring amino acid
  MISC_FEATURE (848)..(848): Xaa can be any naturally occurring amino acid
  MISC_FEATURE (850)..(850): Xaa can be any naturally occurring amino acid except Pro or Gly
  MISC_FEATURE (851)..(851): Xaa can be any naturally occurring amino acid except Pro or Gly
  MISC_FEATURE (852)..(852): Xaa can be any naturally occurring amino acid except Pro or Gly
  MISC_FEATURE (853)..(853): Xaa can be any naturally occurring amino acid except Pro or Gly
  MISC_FEATURE (855)..(855): Xaa can be any naturally occurring amino acid
  MISC_FEATURE (856)..(856): Xaa can be any naturally occurring amino acid
  MISC_FEATURE (857)..(857): Xaa can be any naturally occurring amino acid
  MISC_FEATURE (859)..(859): Xaa can be any naturally occurring amino acid except Pro or Gly
  MISC_FEATURE (860)..(860): Xaa can be any naturally occurring amino acid except Pro or Gly
  MISC_FEATURE (861)..(861): Xaa can be any naturally occurring amino acid except Pro or Gly
  MISC_FEATURE (862)..(862): Xaa can be any naturally occurring amino acid except Pro or Gly
  MISC_FEATURE (864)..(864): Xaa can be any naturally occurring amino acid
  MISC_FEATURE (865)..(865): Xaa can be any naturally occurring amino acid
  MISC_FEATURE (866)..(866): Xaa can be any naturally occurring amino acid
  MISC_FEATURE (868)..(868): Xaa can be any naturally occurring amino acid except Pro or Gly
  MISC_FEATURE (869)..(869): Xaa can be any naturally occurring amino acid except Pro or Gly
  MISC_FEATURE (870)..(870): Xaa can be any naturally occurring amino acid except Pro or Gly
  MISC_FEATURE (871)..(871): Xaa can be any naturally occurring amino acid except Pro or Gly
  MISC_FEATURE (873)..(873): Xaa can be any naturally occurring amino acid
  MISC_FEATURE (874)..(874): Xaa can be any naturally occurring amino acid
  MISC_FEATURE (875)..(875): Xaa can be any naturally occurring amino acid
  MISC_FEATURE (877)..(877): Xaa can be any naturally occurring amino acid except Pro or Gly
  MISC_FEATURE (878)..(878): Xaa can be any naturally occurring amino acid except Pro or Gly
  MISC_FEATURE (879)..(879): Xaa can be any naturally occurring amino acid except Pro or Gly
  MISC_FEATURE (880)..(880): Xaa can be any naturally occurring amino acid except Pro or Gly
  MISC_FEATURE (882)..(882): Xaa can be any naturally occurring amino acid
  MISC_FEATURE (883)..(883): Xaa can be any naturally occurring amino acid
  MISC_FEATURE (884)..(884): Xaa can be any naturally occurring amino acid
  MISC_FEATURE (886)..(886): Xaa can be any naturally occurring amino acid except Pro or Gly
  MISC_FEATURE (887)..(887): Xaa can be any naturally occurring amino acid except Pro or Gly
  MISC_FEATURE (888)..(888): Xaa can be any naturally occurring amino acid except Pro or Gly
  MISC_FEATURE (889)..(889): Xaa can be any naturally occurring amino acid except Pro or Gly
  MISC_FEATURE (891)..(891): Xaa can be any naturally occurring amino acid
  MISC_FEATURE (892)..(892): Xaa can be any naturally occurring amino acid
  MISC_FEATURE (893)..(893): Xaa can be any naturally occurring amino acid
  MISC_FEATURE (895)..(895): Xaa can be any naturally occurring amino acid except Pro or Gly
  MISC_FEATURE (896)..(896): Xaa can be any naturally occurring amino acid except Pro or Gly
  MISC_FEATURE (897)..(897): Xaa can be any naturally occurring amino acid except Pro or Gly
  MISC_FEATURE (898)..(898): Xaa can be any naturally occurring amino acid except Pro or Gly
  MISC_FEATURE (900)..(900): Xaa can be any naturally occurring amino acid
  MISC_FEATURE (901)..(901): Xaa can be any naturally occurring amino acid
  MISC_FEATURE (902)..(902): Xaa can be any naturally occurring amino acid
  MISC_FEATURE (904)..(904): Xaa can be any naturally occurring amino acid except Pro or Gly
  MISC_FEATURE (905)..(905): Xaa can be any naturally occurring amino acid except Pro or Gly
  MISC_FEATURE (906)..(906): Xaa can be any naturally occurring amino acid except Pro or Gly
  MISC_FEATURE (907)..(907): Xaa can be any naturally occurring amino acid except Pro or Gly
  MISC_FEATURE (909)..(909): Xaa can be any naturally occurring amino acid
  MISC_FEATURE (910)..(910): Xaa can be any naturally occurring amino acid
  MISC_FEATURE (911)..(911): Xaa can be any naturally occurring amino acid
  MISC_FEATURE (913)..(913): Xaa can be any naturally occurring amino acid except Pro or Gly
  MISC_FEATURE (914)..(914): Xaa can be any naturally occurring amino acid except Pro or Gly
  MISC_FEATURE (915)..(915): Xaa can be any naturally occurring amino acid except Pro or Gly
  MISC_FEATURE (916)..(916): Xaa can be any naturally occurring amino acid except Pro or Gly
  MISC_FEATURE (918)..(918): Xaa can be any naturally occurring amino acid
  MISC_FEATURE (919)..(919): Xaa can be any naturally occurring amino acid
  MISC_FEATURE (920)..(920): Xaa can be any naturally occurring amino acid
  MISC_FEATURE (922)..(922): Xaa can be any naturally occurring amino acid except Pro or Gly
  MISC_FEATURE (923)..(923): Xaa can be any naturally occurring amino acid except Pro or Gly
  MISC_FEATURE (924)..(924): Xaa can be any naturally occurring amino acid except Pro or Gly
  MISC_FEATURE (925)..(925): Xaa can be any naturally occurring amino acid except Pro or Gly
  MISC_FEATURE (927)..(927): Xaa can be any naturally occurring amino acid
  MISC_FEATURE (928)..(928): Xaa can be any naturally occurring amino acid
  MISC_FEATURE (929)..(929): Xaa can be any naturally occurring amino acid
  MISC_FEATURE (931)..(931): Xaa can be any naturally occurring amino acid except Pro or Gly
  MISC_FEATURE (932)..(932): Xaa can be any naturally occurring amino acid except Pro or Gly
  MISC_FEATURE (933)..(933): Xaa can be any naturally occurring amino acid except Pro or Gly
  MISC_FEATURE (934)..(934): Xaa can be any naturally occurring amino acid except Pro or Gly
  MISC_FEATURE (936)..(936): Xaa can be any naturally occurring amino acid
  MISC_FEATURE (937)..(937): Xaa can be any naturally occurring amino acid
  MISC_FEATURE (938)..(938): Xaa can be any naturally occurring amino acid
  MISC_FEATURE (940)..(940): Xaa can be any naturally occurring amino acid except Pro or Gly
  MISC_FEATURE (941)..(941): Xaa can be any naturally occurring amino acid except Pro or Gly
  MISC_FEATURE (942)..(942): Xaa can be any naturally occurring amino acid except Pro or Gly
  MISC_FEATURE (943)..(943): Xaa can be any naturally occurring amino acid except Pro or Gly
  MISC_FEATURE (945)..(945): Xaa can be any naturally occurring amino acid
  MISC_FEATURE (946)..(946): Xaa can be any naturally occurring amino acid
  MISC_FEATURE (947)..(947): Xaa can be any naturally occurring amino acid
  MISC_FEATURE (949)..(949): Xaa can be any naturally occurring amino acid except Pro or Gly
  MISC_FEATURE (950)..(950): Xaa can be any naturally occurring amino acid except Pro or Gly
  MISC_FEATURE (951)..(951): Xaa can be any naturally occurring amino acid except Pro or Gly
  MISC_FEATURE (952)..(952): Xaa can be any naturally occurring amino acid except Pro or Gly
  MISC_FEATURE (954)..(954): Xaa can be any naturally occurring amino acid
  MISC_FEATURE (955)..(955): Xaa can be any naturally occurring amino acid
  MISC_FEATURE (956)..(956): Xaa can be any naturally occurring amino acid
  MISC_FEATURE (958)..(958): Xaa can be any naturally occurring amino acid except Pro or Gly
  MISC_FEATURE (959)..(959): Xaa can be any naturally occurring amino acid except Pro or Gly
  MISC_FEATURE (960)..(960): Xaa can be any naturally occurring amino acid except Pro or Gly
  MISC_FEATURE (961)..(961): Xaa can be any naturally occurring amino acid except Pro or Gly
  MISC_FEATURE (963)..(963): Xaa can be any naturally occurring amino acid
  MISC_FEATURE (964)..(964): Xaa can be any naturally occurring amino acid
  MISC_FEATURE (965)..(965): Xaa can be any naturally occurring amino acid
  MISC_FEATURE (967)..(967): Xaa can be any naturally occurring amino acid except Pro or Gly
  MISC_FEATURE (968)..(968): Xaa can be any naturally occurring amino acid except Pro or Gly
  MISC_FEATURE (969)..(969): Xaa can be any naturally occurring amino acid except Pro or Gly
  MISC_FEATURE (970)..(970): Xaa can be any naturally occurring amino acid except Pro or Gly
  MISC_FEATURE (972)..(972): Xaa can be any naturally occurring amino acid
  MISC_FEATURE (973)..(973): Xaa can be any naturally occurring amino acid
  MISC_FEATURE (974)..(974): Xaa can be any naturally occurring amino acid
  MISC_FEATURE (976)..(976): Xaa can be any naturally occurring amino acid except Pro or Gly
  MISC_FEATURE (977)..(977): Xaa can be any naturally occurring amino acid except Pro or Gly
  MISC_FEATURE (978)..(978): Xaa can be any naturally occurring amino acid except Pro or Gly
  MISC_FEATURE (979)..(979): Xaa can be any naturally occurring amino acid except Pro or Gly
  MISC_FEATURE (981)..(981): Xaa can be any naturally occurring amino acid
  MISC_FEATURE (982)..(982): Xaa can be any naturally occurring amino acid
  MISC_FEATURE (983)..(983): Xaa can be any naturally occurring amino acid
  MISC_FEATURE (985)..(985): Xaa can be any naturally occurring amino acid except Pro or Gly
  MISC_FEATURE (986)..(986): Xaa can be any naturally occurring amino acid except Pro or Gly
  MISC_FEATURE (987)..(987): Xaa can be any naturally occurring amino acid except Pro or Gly
  MISC_FEATURE (988)..(988): Xaa can be any naturally occurring amino acid except Pro or Gly
  MISC_FEATURE (990)..(990): Xaa can be any naturally occurring amino acid
  MISC_FEATURE (991)..(991): Xaa can be any naturally occurring amino acid
  MISC_FEATURE (992)..(992): Xaa can be any naturally occurring amino acid
  MISC_FEATURE (994)..(994): Xaa can be any naturally occurring amino acid except Pro or Gly
  MISC_FEATURE (995)..(995): Xaa can be any naturally occurring amino acid except Pro or Gly
  MISC_FEATURE (996)..(996): Xaa can be any naturally occurring amino acid except Pro or Gly
  MISC_FEATURE (997)..(997): Xaa can be any naturally occurring amino acid except Pro or Gly
  MISC_FEATURE (999)..(999): Xaa can be any naturally occurring amino acid
  MISC_FEATURE (1000)..(1000): Xaa can be any naturally occurring amino acid
  MISC_FEATURE (1001)..(1001): Xaa can be any naturally occurring amino acid
  MISC_FEATURE (1003)..(1003): Xaa can be any naturally occurring amino acid except Pro or Gly
  MISC_FEATURE (1004)..(1004): Xaa can be any naturally occurring amino acid except Pro or Gly
  MISC_FEATURE (1005)..(1005): Xaa can be any naturally occurring amino acid except Pro or Gly
  MISC_FEATURE (1006)..(1006): Xaa can be any naturally occurring amino acid except Pro or Gly
  MISC_FEATURE (1008)..(1008): Xaa can be any naturally occurring amino acid
  MISC_FEATURE (1009)..(1009): Xaa can be any naturally occurring amino acid
  MISC_FEATURE (1010)..(1010): Xaa can be any naturally occurring amino acid
  MISC_FEATURE (1012)..(1012): Xaa can be any naturally occurring amino acid except Pro or Gly
  MISC_FEATURE (1013)..(1013): Xaa can be any naturally occurring amino acid except Pro or Gly
  MISC_FEATURE (1014)..(1014): Xaa can be any naturally occurring amino acid except Pro or Gly
  MISC_FEATURE (1015)..(1015): Xaa can be any naturally occurring amino acid except Pro or Gly
  MISC_FEATURE (1017)..(1017): Xaa can be any naturally occurring amino acid
  MISC_FEATURE (1018)..(1018): Xaa can be any naturally occurring amino acid
  MISC_FEATURE (1019)..(1019): Xaa can be any naturally occurring amino acid
  MISC_FEATURE (1021)..(1021): Xaa can be any naturally occurring amino acid except Pro or Gly
  MISC_FEATURE (1022)..(1022): Xaa can be any naturally occurring amino acid except Pro or Gly
  MISC_FEATURE (1023)..(1023): Xaa can be any naturally occurring amino acid except Pro or Gly
  MISC_FEATURE (1024)..(1024): Xaa can be any naturally occurring amino acid except Pro or Gly
  MISC_FEATURE (1026)..(1026): Xaa can be any naturally occurring amino acid
  MISC_FEATURE (1027)..(1027): Xaa can be any naturally occurring amino acid
  MISC_FEATURE (1028)..(1028): Xaa can be any naturally occurring amino acid
  MISC_FEATURE (1030)..(1030): Xaa can be any naturally occurring amino acid except Pro or Gly
  MISC_FEATURE (1031)..(1031): Xaa can be any naturally occurring amino acid except Pro or Gly
  MISC_FEATURE (1032)..(1032): Xaa can be any naturally occurring amino acid except Pro or Gly
  MISC_FEATURE (1033)..(1033): Xaa can be any naturally occurring amino acid except Pro or Gly
  MISC_FEATURE (1035)..(1035): Xaa can be any naturally occurring amino acid
  MISC_FEATURE (1036)..(1036): Xaa can be any naturally occurring amino acid
  MISC_FEATURE (1037)..(1037): Xaa can be any naturally occurring amino acid
  MISC_FEATURE (1039)..(1039): Xaa can be any naturally occurring amino acid except Pro or Gly
  MISC_FEATURE (1040)..(1040): Xaa can be any naturally occurring amino acid except Pro or Gly
  MISC_FEATURE (1041)..(1041): Xaa can be any naturally occurring amino acid except Pro or Gly
  MISC_FEATURE (1042)..(1042): Xaa can be any naturally occurring amino acid except Pro or Gly
  MISC_FEATURE (1044)..(1044): Xaa can be any naturally occurring amino acid
  MISC_FEATURE (1045)..(1045): Xaa can be any naturally occurring amino acid
  MISC_FEATURE (1046)..(1046): Xaa can be any naturally occurring amino acid
  MISC_FEATURE (1048)..(1048): Xaa can be any naturally occurring amino acid except Pro or Gly
  MISC_FEATURE (1049)..(1049): Xaa can be any naturally occurring amino acid except Pro or Gly
  MISC_FEATURE (1050)..(1050): Xaa can be any naturally occurring amino acid except Pro or Gly
  MISC_FEATURE (1051)..(1051): Xaa can be any naturally occurring amino acid except Pro or Gly
  MISC_FEATURE (1053)..(1053): Xaa can be any naturally occurring amino acid
  MISC_FEATURE (1054)..(1054): Xaa can be any naturally occurring amino acid
  MISC_FEATURE (1055)..(1055): Xaa can be any naturally occurring amino acid
  MISC_FEATURE (1057)..(1057): Xaa can be any naturally occurring amino acid except Pro or Gly
  MISC_FEATURE (1058)..(1058): Xaa can be any naturally occurring amino acid except Pro or Gly
  MISC_FEATURE (1059)..(1059): Xaa can be any naturally occurring amino acid except Pro or Gly
  MISC_FEATURE (1060)..(1060): Xaa can be any naturally occurring amino acid except Pro or Gly
  MISC_FEATURE (1062)..(1062): Xaa can be any naturally occurring amino acid
  MISC_FEATURE (1063)..(1063): Xaa can be any naturally occurring amino acid
  MISC_FEATURE (1064)..(1064): Xaa can be any naturally occurring amino acid
  MISC_FEATURE (1066)..(1066): Xaa can be any naturally occurring amino acid except Pro or Gly
  MISC_FEATURE (1067)..(1067): Xaa can be any naturally occurring amino acid except Pro or Gly
  MISC_FEATURE (1068)..(1068): Xaa can be any naturally occurring amino acid except Pro or Gly
  MISC_FEATURE (1069)..(1069): Xaa can be any naturally occurring amino acid except Pro or Gly
  MISC_FEATURE (1071)..(1071): Xaa can be any naturally occurring amino acid
  MISC_FEATURE (1072)..(1072): Xaa can be any naturally occurring amino acid
  MISC_FEATURE (1073)..(1073): Xaa can be any naturally occurring amino acid
  MISC_FEATURE (1075)..(1075): Xaa can be any naturally occurring amino acid except Pro or Gly
  MISC_FEATURE (1076)..(1076): Xaa can be any naturally occurring amino acid except Pro or Gly
  MISC_FEATURE (1077)..(1077): Xaa can be any naturally occurring amino acid except Pro or Gly
  MISC_FEATURE (1078)..(1078): Xaa can be any naturally occurring amino acid except Pro or Gly
  MISC_FEATURE (1080)..(1080): Xaa can be any naturally occurring amino acid
  MISC_FEATURE (1081)..(1081): Xaa can be any naturally occurring amino acid
  MISC_FEATURE (1082)..(1082): Xaa can be any naturally occurring amino acid
  MISC_FEATURE (1084)..(1084): Xaa can be any naturally occurring amino acid except Pro or Gly
  MISC_FEATURE (1085)..(1085): Xaa can be any naturally occurring amino acid except Pro or Gly
  MISC_FEATURE (1086)..(1086): Xaa can be any naturally occurring amino acid except Pro or Gly
  MISC_FEATURE (1087)..(1087): Xaa can be any naturally occurring amino acid except Pro or Gly
  MISC_FEATURE (1089)..(1089): Xaa can be any naturally occurring amino acid
  MISC_FEATURE (1090)..(1090): Xaa can be any naturally occurring amino acid
  MISC_FEATURE (1091)..(1091): Xaa can be any naturally occurring amino acid
  MISC_FEATURE (1093)..(1093): Xaa can be any naturally occurring amino acid except Pro or Gly
  MISC_FEATURE (1094)..(1094): Xaa can be any naturally occurring amino acid except Pro or Gly
  MISC_FEATURE (1095)..(1095): Xaa can be any naturally occurring amino acid except Pro or Gly
  MISC_FEATURE (1096)..(1096): Xaa can be any naturally occurring amino acid except Pro or Gly
  MISC_FEATURE (1098)..(1098): Xaa can be any naturally occurring amino acid
  MISC_FEATURE (1099)..(1099): Xaa can be any naturally occurring amino acid
  MISC_FEATURE (1100)..(1100): Xaa can be any naturally occurring amino acid
  MISC_FEATURE (1102)..(1102): Xaa can be any naturally occurring amino acid except Pro or Gly
  MISC_FEATURE (1103)..(1103): Xaa can be any naturally occurring amino acid except Pro or Gly
  MISC_FEATURE (1104)..(1104): Xaa can be any naturally occurring amino acid except Pro or Gly
  MISC_FEATURE (1105)..(1105): Xaa can be any naturally occurring amino acid except Pro or Gly
  MISC_FEATURE (1107)..(1107): Xaa can be any naturally occurring amino acid
  MISC_FEATURE (1108)..(1108): Xaa can be any naturally occurring amino acid
  MISC_FEATURE (1109)..(1109): Xaa can be any naturally occurring amino acid
  MISC_FEATURE (1111)..(1111): Xaa can be any naturally occurring amino acid except Pro or Gly
  MISC_FEATURE (1112)..(1112): Xaa can be any naturally occurring amino acid except Pro or Gly
  MISC_FEATURE (1113)..(1113): Xaa can be any naturally occurring amino acid except Pro or Gly
  MISC_FEATURE (1114)..(1114): Xaa can be any naturally occurring amino acid except Pro or Gly
  MISC_FEATURE (1116)..(1116): Xaa can be any naturally occurring amino acid
  MISC_FEATURE (1117)..(1117): Xaa can be any naturally occurring amino acid
  MISC_FEATURE (1118)..(1118): Xaa can be any naturally occurring amino acid
  MISC_FEATURE (1120)..(1120): Xaa can be any naturally occurring amino acid except Pro or Gly
  MISC_FEATURE (1121)..(1121): Xaa can be any naturally occurring amino acid except Pro or Gly
  MISC_FEATURE (1122)..(1122): Xaa can be any naturally occurring amino acid except Pro or Gly
  MISC_FEATURE (1123)..(1123): Xaa can be any naturally occurring amino acid except Pro or Gly
  MISC_FEATURE (1125)..(1125): Xaa can be any naturally occurring amino acid
  MISC_FEATURE (1126)..(1126): Xaa can be any naturally occurring amino acid
  MISC_FEATURE (1127)..(1127): Xaa can be any naturally occurring amino acid
  MISC_FEATURE (1129)..(1129): Xaa can be any naturally occurring amino acid except Pro or Gly
  MISC_FEATURE (1130)..(1130): Xaa can be any naturally occurring amino acid except Pro or Gly
  MISC_FEATURE (1131)..(1131): Xaa can be any naturally occurring amino acid except Pro or Gly
  MISC_FEATURE (1132)..(1132): Xaa can be any naturally occurring amino acid except Pro or Gly
  MISC_FEATURE (1134)..(1134): Xaa can be any naturally occurring amino acid
  MISC_FEATURE (1135)..(1135): Xaa can be any naturally occurring amino acid
  MISC_FEATURE (1136)..(1136): Xaa can be any naturally occurring amino acid
  MISC_FEATURE (1138)..(1138): Xaa can be any naturally occurring amino acid except Pro or Gly
  MISC_FEATURE (1139)..(1139): Xaa can be any naturally occurring amino acid except Pro or Gly
  MISC_FEATURE (1140)..(1140): Xaa can be any naturally occurring amino acid except Pro or Gly
  MISC_FEATURE (1141)..(1141): Xaa can be any naturally occurring amino acid except Pro or Gly
  MISC_FEATURE (1143)..(1143): Xaa can be any naturally occurring amino acid
  MISC_FEATURE (1144)..(1144): Xaa can be any naturally occurring amino acid
  MISC_FEATURE (1145)..(1145): Xaa can be any naturally occurring amino acid
  MISC_FEATURE (1147)..(1147): Xaa can be any naturally occurring amino acid except Pro or Gly
  MISC_FEATURE (1148)..(1148): Xaa can be any naturally occurring amino acid except Pro or Gly
  MISC_FEATURE (1149)..(1149): Xaa can be any naturally occurring amino acid except Pro or Gly
  MISC_FEATURE (1150)..(1150): Xaa can be any naturally occurring amino acid except Pro or Gly
  MISC_FEATURE (1152)..(1152): Xaa can be any naturally occurring amino acid
  MISC_FEATURE (1153)..(1153): Xaa can be any naturally occurring amino acid
  MISC_FEATURE (1154)..(1154): Xaa can be any naturally occurring amino acid
  MISC_FEATURE (1156)..(1156): Xaa can be any naturally occurring amino acid except Pro or Gly
  MISC_FEATURE (1157)..(1157): Xaa can be any naturally occurring amino acid except Pro or Gly
  MISC_FEATURE (1158)..(1158): Xaa can be any naturally occurring amino acid except Pro or Gly
  MISC_FEATURE (1159)..(1159): Xaa can be any naturally occurring amino acid except Pro or Gly
  MISC_FEATURE (1161)..(1161): Xaa can be any naturally occurring amino acid
  MISC_FEATURE (1162)..(1162): Xaa can be any naturally occurring amino acid
  MISC_FEATURE (1163)..(1163): Xaa can be any naturally occurring amino acid
  MISC_FEATURE (1165)..(1165): Xaa can be any naturally occurring amino acid except Pro or Gly
  MISC_FEATURE (1166)..(1166): Xaa can be any naturally occurring amino acid except Pro or Gly
  MISC_FEATURE (1167)..(1167): Xaa can be any naturally occurring amino acid except Pro or Gly
  MISC_FEATURE (1168)..(1168): Xaa can be any naturally occurring amino acid except Pro or Gly
  MISC_FEATURE (1170)..(1170): Xaa can be any naturally occurring amino acid
  MISC_FEATURE (1171)..(1171): Xaa can be any naturally occurring amino acid
  MISC_FEATURE (1172)..(1172): Xaa can be any naturally occurring amino acid
  MISC_FEATURE (1174)..(1174): Xaa can be any naturally occurring amino acid except Pro or Gly
  MISC_FEATURE (1175)..(1175): Xaa can be any naturally occurring amino acid except Pro or Gly
  MISC_FEATURE (1176)..(1176): Xaa can be any naturally occurring amino acid except Pro or Gly
  MISC_FEATURE (1177)..(1177): Xaa can be any naturally occurring amino acid except Pro or Gly
  MISC_FEATURE (1179)..(1179): Xaa can be any naturally occurring amino acid
  MISC_FEATURE (1180)..(1180): Xaa can be any naturally occurring amino acid
  MISC_FEATURE (1181)..(1181): Xaa can be any naturally occurring amino acid
  MISC_FEATURE (1183)..(1183): Xaa can be any naturally occurring amino acid except Pro or Gly
  MISC_FEATURE (1184)..(1184): Xaa can be any naturally occurring amino acid except Pro or Gly
  MISC_FEATURE (1185)..(1185): Xaa can be any naturally occurring amino acid except Pro or Gly
  MISC_FEATURE (1186)..(1186): Xaa can be any naturally occurring amino acid except Pro or Gly
  MISC_FEATURE (1188)..(1188): Xaa can be any naturally occurring amino acid
  MISC_FEATURE (1189)..(1189): Xaa can be any naturally occurring amino acid
  MISC_FEATURE (1190)..(1190): Xaa can be any naturally occurring amino acid
  MISC_FEATURE (1192)..(1192): Xaa can be any naturally occurring amino acid except Pro or Gly
  MISC_FEATURE (1193)..(1193): Xaa can be any naturally occurring amino acid except Pro or Gly
  MISC_FEATURE (1194)..(1194): Xaa can be any naturally occurring amino acid except Pro or Gly
  MISC_FEATURE (1195)..(1195): Xaa can be any naturally occurring amino acid except Pro or Gly
  MISC_FEATURE (1197)..(1197): Xaa can be any naturally occurring amino acid
  MISC_FEATURE (1198)..(1198): Xaa can be any naturally occurring amino acid
  MISC_FEATURE (1199)..(1199): Xaa can be any naturally occurring amino acid
  MISC_FEATURE (1201)..(1201): Xaa can be any naturally occurring amino acid except Pro or Gly
  MISC_FEATURE (1202)..(1202): Xaa can be any naturally occurring amino acid except Pro or Gly
  MISC_FEATURE (1203)..(1203): Xaa can be any naturally occurring amino acid except Pro or Gly
  MISC_FEATURE (1204)..(1204): Xaa can be any naturally occurring amino acid except Pro or Gly
  MISC_FEATURE (1206)..(1206): Xaa can be any naturally occurring amino acid
  MISC_FEATURE (1207)..(1207): Xaa can be any naturally occurring amino acid
  MISC_FEATURE (1208)..(1208): Xaa can be any naturally occurring amino acid
  MISC_FEATURE (1210)..(1210): Xaa can be any naturally occurring amino acid except Pro or Gly
  MISC_FEATURE (1211)..(1211): Xaa can be any naturally occurring amino acid except Pro or Gly
  MISC_FEATURE (1212)..(1212): Xaa can be any naturally occurring amino acid except Pro or Gly
  MISC_FEATURE (1213)..(1213): Xaa can be any naturally occurring amino acid except Pro or Gly
  MISC_FEATURE (1215)..(1215): Xaa can be any naturally occurring amino acid
  MISC_FEATURE (1216)..(1216): Xaa can be any naturally occurring amino acid
  MISC_FEATURE (1217)..(1217): Xaa can be any naturally occurring amino acid
  MISC_FEATURE (1219)..(1219): Xaa can be any naturally occurring amino acid except Pro or Gly
  MISC_FEATURE (1220)..(1220): Xaa can be any naturally occurring amino acid except Pro or Gly
  MISC_FEATURE (1221)..(1221): Xaa can be any naturally occurring amino acid except Pro or Gly
  MISC_FEATURE (1222)..(1222): Xaa can be any naturally occurring amino acid except Pro or Gly
  MISC_FEATURE (1224)..(1224): Xaa can be any naturally occurring amino acid
  MISC_FEATURE (1225)..(1225): Xaa can be any naturally occurring amino acid
  MISC_FEATURE (1226)..(1226): Xaa can be any naturally occurring amino acid
  MISC_FEATURE (1228)..(1228): Xaa can be any naturally occurring amino acid except Pro or Gly
  MISC_FEATURE (1229)..(1229): Xaa can be any naturally occurring amino acid except Pro or Gly
  MISC_FEATURE (1230)..(1230): Xaa can be any naturally occurring amino acid except Pro or Gly
  MISC_FEATURE (1231)..(1231): Xaa can be any naturally occurring amino acid except Pro or Gly
  MISC_FEATURE (1233)..(1233): Xaa can be any naturally occurring amino acid
  MISC_FEATURE (1234)..(1234): Xaa can be any naturally occurring amino acid
  MISC_FEATURE (1235)..(1235): Xaa can be any naturally occurring amino acid
  MISC_FEATURE (1237)..(1237): Xaa can be any naturally occurring amino acid except Pro or Gly
  MISC_FEATURE (1238)..(1238): Xaa can be any naturally occurring amino acid except Pro or Gly
  MISC_FEATURE (1239)..(1239): Xaa can be any naturally occurring amino acid except Pro or Gly
  MISC_FEATURE (1240)..(1240): Xaa can be any naturally occurring amino acid except Pro or Gly
  MISC_FEATURE (1242)..(1242): Xaa can be any naturally occurring amino acid
  MISC_FEATURE (1243)..(1243): Xaa can be any naturally occurring amino acid
  MISC_FEATURE (1244)..(1244): Xaa can be any naturally occurring amino acid
  MISC_FEATURE (1246)..(1246): Xaa can be any naturally occurring amino acid except Pro or Gly
  MISC_FEATURE (1247)..(1247): Xaa can be any naturally occurring amino acid except Pro or Gly
  MISC_FEATURE (1248)..(1248): Xaa can be any naturally occurring amino acid except Pro or Gly
  MISC_FEATURE (1249)..(1249): Xaa can be any naturally occurring amino acid except Pro or Gly
  MISC_FEATURE (1251)..(1251): Xaa can be any naturally occurring amino acid
  MISC_FEATURE (1252)..(1252): Xaa can be any naturally occurring amino acid
  MISC_FEATURE (1253)..(1253): Xaa can be any naturally occurring amino acid
  MISC_FEATURE (1255)..(1255): Xaa can be any naturally occurring amino acid except Pro or Gly
  MISC_FEATURE (1256)..(1256): Xaa can be any naturally occurring amino acid except Pro or Gly
  MISC_FEATURE (1257)..(1257): Xaa can be any naturally occurring amino acid except Pro or Gly
  MISC_FEATURE (1258)..(1258): Xaa can be any naturally occurring amino acid except Pro or Gly
  MISC_FEATURE (1260)..(1260): Xaa can be any naturally occurring amino acid
  MISC_FEATURE (1261)..(1261): Xaa can be any naturally occurring amino acid
  MISC_FEATURE (1262)..(1262): Xaa can be any naturally occurring amino acid
  MISC_FEATURE (1264)..(1264): Xaa can be any naturally occurring amino acid except Pro or Gly
  MISC_FEATURE (1265)..(1265): Xaa can be any naturally occurring amino acid except Pro or Gly
  MISC_FEATURE (1266)..(1266): Xaa can be any naturally occurring amino acid except Pro or Gly
  MISC_FEATURE (1267)..(1267): Xaa can be any naturally occurring amino acid except Pro or Gly
  MISC_FEATURE (1269)..(1269): Xaa can be any naturally occurring amino acid
  MISC_FEATURE (1270)..(1270): Xaa can be any naturally occurring amino acid
  MISC_FEATURE (1271)..(1271): Xaa can be any naturally occurring amino acid
  MISC_FEATURE (1273)..(1273): Xaa can be any naturally occurring amino acid except Pro or Gly
  MISC_FEATURE (1274)..(1274): Xaa can be any naturally occurring amino acid except Pro or Gly
  MISC_FEATURE (1275)..(1275): Xaa can be any naturally occurring amino acid except Pro or Gly
  MISC_FEATURE (1276)..(1276): Xaa can be any naturally occurring amino acid except Pro or Gly
  MISC_FEATURE (1278)..(1278): Xaa can be any naturally occurring amino acid
  MISC_FEATURE (1279)..(1279): Xaa can be any naturally occurring amino acid
  MISC_FEATURE (1280)..(1280): Xaa can be any naturally occurring amino acid
  MISC_FEATURE (1282)..(1282): Xaa can be any naturally occurring amino acid except Pro or Gly
  MISC_FEATURE (1283)..(1283): Xaa can be any naturally occurring amino acid except Pro or Gly
  MISC_FEATURE (1284)..(1284): Xaa can be any naturally occurring amino acid except Pro or Gly
  MISC_FEATURE (1285)..(1285): Xaa can be any naturally occurring amino acid except Pro or Gly
  MISC_FEATURE (1287)..(1287): Xaa can be any naturally occurring amino acid
  MISC_FEATURE (1288)..(1288): Xaa can be any naturally occurring amino acid
  MISC_FEATURE (1289)..(1289): Xaa can be any naturally occurring amino acid
  MISC_FEATURE (1291)..(1291): Xaa can be any naturally occurring amino acid except Pro or Gly
  MISC_FEATURE (1292)..(1292): Xaa can be any naturally occurring amino acid except Pro or Gly
  MISC_FEATURE (1293)..(1293): Xaa can be any naturally occurring amino acid except Pro or Gly
  MISC_FEATURE (1294)..(1294): Xaa can be any naturally occurring amino acid except Pro or Gly
  MISC_FEATURE (1296)..(1296): Xaa can be any naturally occurring amino acid
  MISC_FEATURE (1297)..(1297): Xaa can be any naturally occurring amino acid
  MISC_FEATURE (1298)..(1298): Xaa can be any naturally occurring amino acid
  MISC_FEATURE (1300)..(1300): Xaa can be any naturally occurring amino acid except Pro or Gly
  MISC_FEATURE (1301)..(1301): Xaa can be any naturally occurring amino acid except Pro or Gly
  MISC_FEATURE (1302)..(1302): Xaa can be any naturally occurring amino acid except Pro or Gly
  MISC_FEATURE (1303)..(1303): Xaa can be any naturally occurring amino acid except Pro or Gly
  MISC_FEATURE (1305)..(1305): Xaa can be any naturally occurring amino acid
  MISC_FEATURE (1306)..(1306): Xaa can be any naturally occurring amino acid
  MISC_FEATURE (1307)..(1307): Xaa can be any naturally occurring amino acid
  MISC_FEATURE (1309)..(1309): Xaa can be any naturally occurring amino acid except Pro or Gly
  MISC_FEATURE (1310)..(1310): Xaa can be any naturally occurring amino acid except Pro or Gly
  MISC_FEATURE (1311)..(1311): Xaa can be any naturally occurring amino acid except Pro or Gly
  MISC_FEATURE (1312)..(1312): Xaa can be any naturally occurring amino acid except Pro or Gly
  MISC_FEATURE (1314)..(1314): Xaa can be any naturally occurring amino acid
  MISC_FEATURE (1315)..(1315): Xaa can be any naturally occurring amino acid
  MISC_FEATURE (1316)..(1316): Xaa can be any naturally occurring amino acid
  MISC_FEATURE (1318)..(1318): Xaa can be any naturally occurring amino acid except Pro or Gly
  MISC_FEATURE (1319)..(1319): Xaa can be any naturally occurring amino acid except Pro or Gly
  MISC_FEATURE (1320)..(1320): Xaa can be any naturally occurring amino acid except Pro or Gly
  MISC_FEATURE (1321)..(1321): Xaa can be any naturally occurring amino acid except Pro or Gly
  MISC_FEATURE (1323)..(1323): Xaa can be any naturally occurring amino acid
  MISC_FEATURE (1324)..(1324): Xaa can be any naturally occurring amino acid
  MISC_FEATURE (1325)..(1325): Xaa can be any naturally occurring amino acid
  MISC_FEATURE (1327)..(1327): Xaa can be any naturally occurring amino acid except Pro or Gly
  MISC_FEATURE (1328)..(1328): Xaa can be any naturally occurring amino acid except Pro or Gly
  MISC_FEATURE (1329)..(1329): Xaa can be any naturally occurring amino acid except Pro or Gly
  MISC_FEATURE (1330)..(1330): Xaa can be any naturally occurring amino acid except Pro or Gly
  MISC_FEATURE (1332)..(1332): Xaa can be any naturally occurring amino acid
  MISC_FEATURE (1333)..(1333): Xaa can be any naturally occurring amino acid
  MISC_FEATURE (1334)..(1334): Xaa can be any naturally occurring amino acid
  MISC_FEATURE (1336)..(1336): Xaa can be any naturally occurring amino acid except Pro or Gly
  MISC_FEATURE (1337)..(1337): Xaa can be any naturally occurring amino acid except Pro or Gly
  MISC_FEATURE (1338)..(1338): Xaa can be any naturally occurring amino acid except Pro or Gly
  MISC_FEATURE (1339)..(1339): Xaa can be any naturally occurring amino acid except Pro or Gly
  MISC_FEATURE (1341)..(1341): Xaa can be any naturally occurring amino acid
  MISC_FEATURE (1342)..(1342): Xaa can be any naturally occurring amino acid
  MISC_FEATURE (1343)..(1343): Xaa can be any naturally occurring amino acid
  MISC_FEATURE (1345)..(1345): Xaa can be any naturally occurring amino acid except Pro or Gly
  MISC_FEATURE (1346)..(1346): Xaa can be any naturally occurring amino acid except Pro or Gly
  MISC_FEATURE (1347)..(1347): Xaa can be any naturally occurring amino acid except Pro or Gly
  MISC_FEATURE (1348)..(1348): Xaa can be any naturally occurring amino acid except Pro or Gly
  MISC_FEATURE (1350)..(1350): Xaa can be any naturally occurring amino acid
  MISC_FEATURE (1351)..(1351): Xaa can be any naturally occurring amino acid
  MISC_FEATURE (1352)..(1352): Xaa can be any naturally occurring amino acid
  MISC_FEATURE (1354)..(1354): Xaa can be any naturally occurring amino acid except Pro or Gly
  MISC_FEATURE (1355)..(1355): Xaa can be any naturally occurring amino acid except Pro or Gly
  MISC_FEATURE (1356)..(1356): Xaa can be any naturally occurring amino acid except Pro or Gly
  MISC_FEATURE (1357)..(1357): Xaa can be any naturally occurring amino acid except Pro or Gly
  MISC_FEATURE (1359)..(1359): Xaa can be any naturally occurring amino acid
  MISC_FEATURE (1360)..(1360): Xaa can be any naturally occurring amino acid
  MISC_FEATURE (1361)..(1361): Xaa can be any naturally occurring amino acid
  MISC_FEATURE (1363)..(1363): Xaa can be any naturally occurring amino acid except Pro or Gly
  MISC_FEATURE (1364)..(1364): Xaa can be any naturally occurring amino acid except Pro or Gly
  MISC_FEATURE (1365)..(1365): Xaa can be any naturally occurring amino acid except Pro or Gly
  MISC_FEATURE (1366)..(1366): Xaa can be any naturally occurring amino acid except Pro or Gly
  MISC_FEATURE (1368)..(1368): Xaa can be any naturally occurring amino acid
  MISC_FEATURE (1369)..(1369): Xaa can be any naturally occurring amino acid
  MISC_FEATURE (1370)..(1370): Xaa can be any naturally occurring amino acid
  MISC_FEATURE (1372)..(1372): Xaa can be any naturally occurring amino acid except Pro or Gly
  MISC_FEATURE (1373)..(1373): Xaa can be any naturally occurring amino acid except Pro or Gly
  MISC_FEATURE (1374)..(1374): Xaa can be any naturally occurring amino acid except Pro or Gly
  MISC_FEATURE (1375)..(1375): Xaa can be any naturally occurring amino acid except Pro or Gly
  MISC_FEATURE (1377)..(1377): Xaa can be any naturally occurring amino acid
  MISC_FEATURE (1378)..(1378): Xaa can be any naturally occurring amino acid
  MISC_FEATURE (1379)..(1379): Xaa can be any naturally occurring amino acid
  MISC_FEATURE (1381)..(1381): Xaa can be any naturally occurring amino acid except Pro or Gly
  MISC_FEATURE (1382)..(1382): Xaa can be any naturally occurring amino acid except Pro or Gly
  MISC_FEATURE (1383)..(1383): Xaa can be any naturally occurring amino acid except Pro or Gly
  MISC_FEATURE (1384)..(1384): Xaa can be any naturally occurring amino acid except Pro or Gly
  MISC_FEATURE (1386)..(1386): Xaa can be any naturally occurring amino acid
  MISC_FEATURE (1387)..(1387): Xaa can be any naturally occurring amino acid
  MISC_FEATURE (1388)..(1388): Xaa can be any naturally occurring amino acid
  MISC_FEATURE (1390)..(1390): Xaa can be any naturally occurring amino acid except Pro or Gly
  MISC_FEATURE (1391)..(1391): Xaa can be any naturally occurring amino acid except Pro or Gly
  MISC_FEATURE (1392)..(1392): Xaa can be any naturally occurring amino acid except Pro or Gly
  MISC_FEATURE (1393)..(1393): Xaa can be any naturally occurring amino acid except Pro or Gly
  MISC_FEATURE (1395)..(1395): Xaa can be any naturally occurring amino acid
  MISC_FEATURE (1396)..(1396): Xaa can be any naturally occurring amino acid
  MISC_FEATURE (1397)..(1397): Xaa can be any naturally occurring amino acid
  MISC_FEATURE (1399)..(1399): Xaa can be any naturally occurring amino acid except Pro or Gly
  MISC_FEATURE (1400)..(1400): Xaa can be any naturally occurring amino acid except Pro or Gly
  MISC_FEATURE (1401)..(1401): Xaa can be any naturally occurring amino acid except Pro or Gly
  MISC_FEATURE (1402)..(1402): Xaa can be any naturally occurring amino acid except Pro or Gly
  MISC_FEATURE (1404)..(1404): Xaa can be any naturally occurring amino acid
  MISC_FEATURE (1405)..(1405): Xaa can be any naturally occurring amino acid
  MISC_FEATURE (1406)..(1406): Xaa can be any naturally occurring amino acid
  MISC_FEATURE (1408)..(1408): Xaa can be any naturally occurring amino acid except Pro or Gly
  MISC_FEATURE (1409)..(1409): Xaa can be any naturally occurring amino acid except Pro or Gly
  MISC_FEATURE (1410)..(1410): Xaa can be any naturally occurring amino acid except Pro or Gly
  MISC_FEATURE (1411)..(1411): Xaa can be any naturally occurring amino acid except Pro or Gly
  MISC_FEATURE (1413)..(1413): Xaa can be any naturally occurring amino acid
  MISC_FEATURE (1414)..(1414): Xaa can be any naturally occurring amino acid
  MISC_FEATURE (1415)..(1415): Xaa can be any naturally occurring amino acid
  MISC_FEATURE (1417)..(1417): Xaa can be any naturally occurring amino acid except Pro or Gly
  MISC_FEATURE (1418)..(1418): Xaa can be any naturally occurring amino acid except Pro or Gly
  MISC_FEATURE (1419)..(1419): Xaa can be any naturally occurring amino acid except Pro or Gly
  MISC_FEATURE (1420)..(1420): Xaa can be any naturally occurring amino acid except Pro or Gly
  MISC_FEATURE (1422)..(1422): Xaa can be any naturally occurring amino acid
  MISC_FEATURE (1423)..(1423): Xaa can be any naturally occurring amino acid
  MISC_FEATURE (1424)..(1424): Xaa can be any naturally occurring amino acid
  MISC_FEATURE (1426)..(1426): Xaa can be any naturally occurring amino acid except Pro or Gly
  MISC_FEATURE (1427)..(1427): Xaa can be any naturally occurring amino acid except Pro or Gly
  MISC_FEATURE (1428)..(1428): Xaa can be any naturally occurring amino acid except Pro or Gly
  MISC_FEATURE (1429)..(1429): Xaa can be any naturally occurring amino acid except Pro or Gly
  MISC_FEATURE (1431)..(1431): Xaa can be any naturally occurring amino acid
  MISC_FEATURE (1432)..(1432): Xaa can be any naturally occurring amino acid
  MISC_FEATURE (1433)..(1433): Xaa can be any naturally occurring amino acid
  MISC_FEATURE (1435)..(1435): Xaa can be any naturally occurring amino acid except Pro or Gly
  MISC_FEATURE (1436)..(1436): Xaa can be any naturally occurring amino acid except Pro or Gly
  MISC_FEATURE (1437)..(1437): Xaa can be any naturally occurring amino acid except Pro or Gly
  MISC_FEATURE (1438)..(1438): Xaa can be any naturally occurring amino acid except Pro or Gly
  MISC_FEATURE (1440)..(1440): Xaa can be any naturally occurring amino acid
XXPXXXXGXXXPXXXXGXXXPXXXXGXXXPXXXXGXXXPXXXXGXXXPXXXXGXXXPXXXXGXXXPXXXXGXXXPXXXXGXXXPXXXXGXXXPXXXXGXXXPXXXXGXXXPXXXXGXXXPXXXXGXXXPXXXXGXXXPXXXXGXXXPXXXXGXXXPXXXXGXXXPXXXXGXXXPXXXXGXXXPXXXXGXXXPXXXXGXXXPXXXXGXXXPXXXXGXXXPXXXXGXXXPXXXXGXXXPXXXXGXXXPXXXXGXXXPXXXXGXXXPXXXXGXXXPXXXXGXXXPXXXXGXXXPXXXXGXXXPXXXXGXXXPXXXXGXXXPXXXXGXXXPXXXXGXXXPXXXXGXXXPXXXXGXXXPXXXXGXXXPXXXXGXXXPXXXXGXXXPXXXXGXXXPXXXXGXXXPXXXXGXXXPXXXXGXXXPXXXXGXXXPXXXXGXXXPXXXXGXXXPXXXXGXXXPXXXXGXXXPXXXXGXXXPXXXXGXXXPXXXXGXXXPXXXXGXXXPXXXXGXXXPXXXXGXXXPXXXXGXXXPXXXXGXXXPXXXXGXXXPXXXXGXXXPXXXXGXXXPXXXXGXXXPXXXXGXXXPXXXXGXXXPXXXXGXXXPXXXXGXXXPXXXXGXXXPXXXXGXXXPXXXXGXXXPXXXXGXXXPXXXXGXXXPXXXXGXXXPXXXXGXXXPXXXXGXXXPXXXXGXXXPXXXXGXXXPXXXXGXXXPXXXXGXXXPXXXXGXXXPXXXXGXXXPXXXXGXXXPXXXXGXXXPXXXXGXXXPXXXXGXXXPXXXXGXXXPXXXXGXXXPXXXXGXXXPXXXXGXXXPXXXXGXXXPXXXXGXXXPXXXXGXXXPXXXXGXXXPXXXXGXXXPXXXXGXXXPXXXXGXXXPXXXXGXXXPXXXXGXXXPXXXXGXXXPXXXXGXXXPXXXXGXXXPXXXXGXXXPXXXXGXXXPXXXXGXXXPXXXXGXXXPXXXXGXXXPXXXXGXXXPXXXXGXXXPXXXXGXXXPXXXXGXXXPXXXXGXXXPXXXXGXXXPXXXXGXXXPXXXXGXXXPXXXXGXXXPXXXXGXXXPXXXXGXXXPXXXXGXXXPXXXXGXXXPXXXXGXXXPXXXXGXXXPXXXXGXXXPXXXXGXXXPXXXXGXXXPXXXXGXXXPXXXXGXXXPXXXXGXXXPXXXXGXXXPXXXXGXXXPXXXXGXXXPXXXXGXXXPXXXXGXXXPXXXXGXXXPXXXXGXXXPXXXXGXXXPXXXXGXXXPXXXXGXXXPXXXXGXXXPXXXXGXXXPXXXXGXXXPXXXXGXXXPXXXXGXXXPXXXXGXXXPXXXXGXXXPXXXXGXXXPXXXXGXXXPXXXXGXXXPXXXXGXXXPXXXXGXXXPXXXXGXXXPXXXXGXXXPXXXXGXXXPXXXXGXXXPXXXXGXXXPXXXXGXXXPXXXXGXXXPXXXXGXXXPXXXXGXXXPXXXXGXXXPXXXXGX

SEQ ID NO: 57 - protein, 960 aa, Artificial Sequence
  elastin-like polypeptide
  MISC_FEATURE (1)..(1): Xaa can be any naturally occurring amino acid
  MISC_FEATURE (2)..(2): Xaa can be any naturally occurring amino acid
  MISC_FEATURE (4)..(4): Xaa can be any naturally occurring amino acid except Pro or Gly
  MISC_FEATURE (6)..(6): Xaa can be any naturally occurring amino acid
  MISC_FEATURE (7)..(7): Xaa can be any naturally occurring amino acid
  MISC_FEATURE (8)..(8): Xaa can be any naturally occurring amino acid
  MISC_FEATURE (10)..(10): Xaa can be any naturally occurring amino acid except Pro or Gly
  MISC_FEATURE (12)..(12): Xaa can be any naturally occurring amino acid
  MISC_FEATURE (13)..(13): Xaa can be any naturally occurring amino acid
  MISC_FEATURE (14)..(14): Xaa can be any naturally occurring amino acid
  MISC_FEATURE (16)..(16): Xaa can be any naturally occurring amino acid except Pro or Gly
  MISC_FEATURE (18)..(18): Xaa can be any naturally occurring amino acid
  MISC_FEATURE (19)..(19): Xaa can be any naturally occurring amino acid
  MISC_FEATURE (20)..(20): Xaa can be any naturally occurring amino acid
  MISC_FEATURE (22)..(22): Xaa can be any naturally occurring amino acid except Pro or Gly
  MISC_FEATURE (24)..(24): Xaa can be any naturally occurring amino acid
  MISC_FEATURE (25)..(25): Xaa can be any naturally occurring amino acid
  MISC_FEATURE (26)..(26): Xaa can be any naturally occurring amino acid
  MISC_FEATURE (28)..(28): Xaa can be any naturally occurring amino acid except Pro or Gly
  MISC_FEATURE (30)..(30): Xaa can be any naturally occurring amino acid
  MISC_FEATURE (31)..(31): Xaa can be any naturally occurring amino acid
  MISC_FEATURE (32)..(32): Xaa can be any naturally occurring amino acid
  MISC_FEATURE (34)..(34): Xaa can be any naturally occurring amino acid except Pro or Gly
  MISC_FEATURE (36)..(36): Xaa can be any naturally occurring amino acid
  MISC_FEATURE (37)..(37): Xaa can be any naturally occurring amino acid
  MISC_FEATURE (38)..(38): Xaa can be any naturally occurring amino acid
  MISC_FEATURE (40)..(40): Xaa can be any naturally occurring amino acid except Pro or Gly
  MISC_FEATURE (42)..(42): Xaa can be any naturally occurring amino acid
  MISC_FEATURE (43)..(43): Xaa can be any naturally occurring amino acid
  MISC_FEATURE (44)..(44): Xaa can be any naturally occurring amino acid
  MISC_FEATURE (46)..(46): Xaa can be any naturally occurring amino acid except Pro or Gly
  MISC_FEATURE (48)..(48): Xaa can be any naturally occurring amino acid
  MISC_FEATURE (49)..(49): Xaa can be any naturally occurring amino acid
  MISC_FEATURE (50)..(50): Xaa can be any naturally occurring amino acid
  MISC_FEATURE (52)..(52): Xaa can be any naturally occurring amino acid except Pro or Gly
  MISC_FEATURE (54)..(54): Xaa can be any naturally occurring amino acid
  MISC_FEATURE (55)..(55): Xaa can be any naturally occurring amino acid
  MISC_FEATURE (56)..(56): Xaa can be any naturally occurring amino acid
  MISC_FEATURE (58)..(58): Xaa can be any naturally occurring amino acid except Pro or Gly
  MISC_FEATURE (60)..(60): Xaa can be any naturally occurring amino acid
  MISC_FEATURE (61)..(960): May be present or absent in groups of the repeat unit Xaa Xaa Pro Xaa Gly Xaa Xaa
  MISC_FEATURE (61)..(61): Xaa can be any naturally occurring amino acid
  MISC_FEATURE (62)..(62): Xaa can be any naturally occurring amino acid
  MISC_FEATURE (64)..(64): Xaa can be any naturally occurring amino acid except Pro or Gly
  MISC_FEATURE (66)..(66): Xaa can be any naturally occurring amino acid
  MISC_FEATURE (67)..(67): Xaa can be any naturally occurring amino acid
  MISC_FEATURE (68)..(68): Xaa can be any naturally occurring amino acid
  MISC_FEATURE (70)..(70): Xaa can be any naturally occurring amino acid except Pro or Gly
  MISC_FEATURE (72)..(72): Xaa can be any naturally occurring amino acid
  MISC_FEATURE (73)..(73): Xaa can be any naturally occurring amino acid
  MISC_FEATURE (74)..(74): Xaa can be any naturally occurring amino acid
  MISC_FEATURE (76)..(76): Xaa can be any naturally occurring amino acid except Pro or Gly
  MISC_FEATURE (78)..(78): Xaa can be any naturally occurring amino acid
  MISC_FEATURE (79)..(79): Xaa can be any naturally occurring amino acid
  MISC_FEATURE (80)..(80): Xaa can be any naturally occurring amino acid
  MISC_FEATURE (82)..(82): Xaa can be any naturally occurring amino acid except Pro or Gly
  MISC_FEATURE (84)..(84): Xaa can be any naturally occurring amino acid
  MISC_FEATURE (85)..(85): Xaa can be any naturally occurring amino acid
  MISC_FEATURE (86)..(86): Xaa can be any naturally occurring amino acid
  MISC_FEATURE (88)..(88): Xaa can be any naturally occurring amino acid except Pro or Gly
  MISC_FEATURE (90)..(90): Xaa can be any naturally occurring amino acid
  MISC_FEATURE (91)..(91): Xaa can be any naturally occurring amino acid
  MISC_FEATURE (92)..(92): Xaa can be any naturally occurring amino acid
  MISC_FEATURE (94)..(94): Xaa can be any naturally occurring amino acid except Pro or Gly
  MISC_FEATURE (96)..(96): Xaa can be any naturally occurring amino acid
  MISC_FEATURE (97)..(97): Xaa can be any naturally occurring amino acid
  MISC_FEATURE (98)..(98): Xaa can be any naturally occurring amino acid
  MISC_FEATURE (100)..(100): Xaa can be any naturally occurring amino acid except Pro or Gly
  MISC_FEATURE (102)..(102): Xaa can be any naturally occurring amino acid
  MISC_FEATURE (103)..(103): Xaa can be any naturally occurring amino acid
  MISC_FEATURE (104)..(104): Xaa can be any naturally occurring amino acid
  MISC_FEATURE (106)..(106): Xaa can be any naturally occurring amino acid except Pro or Gly
  MISC_FEATURE (108)..(108): Xaa can be any naturally occurring amino acid
  MISC_FEATURE (109)..(109): Xaa can be any naturally occurring amino acid
  MISC_FEATURE (110)..(110): Xaa can be any naturally occurring amino acid
  MISC_FEATURE (112)..(112): Xaa can be any naturally occurring amino acid except Pro or Gly
  MISC_FEATURE (114)..(114): Xaa can be any naturally occurring amino acid
  MISC_FEATURE (115)..(115): Xaa can be any naturally occurring amino acid
  MISC_FEATURE (116)..(116): Xaa can be any naturally occurring amino acid
  MISC_FEATURE (118)..(118): Xaa can be any naturally occurring amino acid except Pro or Gly
  MISC_FEATURE (120)..(120): Xaa can be any naturally occurring amino acid
  MISC_FEATURE (121)..(121): Xaa can be any naturally occurring amino acid
  MISC_FEATURE (122)..(122): Xaa can be any naturally occurring amino acid
  MISC_FEATURE (124)..(124): Xaa can be any naturally occurring amino acid except Pro or Gly
  MISC_FEATURE (126)..(126): Xaa can be any naturally occurring amino acid
  MISC_FEATURE (127)..(127): Xaa can be any naturally occurring amino acid
  MISC_FEATURE (128)..(128): Xaa can be any naturally occurring amino acid
  MISC_FEATURE (130)..(130): Xaa can be any naturally occurring amino acid except Pro or Gly
  MISC_FEATURE (132)..(132): Xaa can be any naturally occurring amino acid
  MISC_FEATURE (133)..(133): Xaa can be any naturally occurring amino acid
  MISC_FEATURE (134)..(134): Xaa can be any naturally occurring amino acid
  MISC_FEATURE (136)..(136): Xaa can be any naturally occurring amino acid except Pro or Gly
  MISC_FEATURE (138)..(138): Xaa can be any naturally occurring amino acid
  MISC_FEATURE (139)..(139): Xaa can be any naturally occurring amino acid
  MISC_FEATURE (140)..(140): Xaa can be any naturally occurring amino acid
  MISC_FEATURE (142)..(142): Xaa can be any naturally occurring amino acid except Pro or Gly
  MISC_FEATURE (144)..(144): Xaa can be any naturally occurring amino acid
  MISC_FEATURE (145)..(145): Xaa can be any naturally occurring amino acid
  MISC_FEATURE (146)..(146): Xaa can be any naturally occurring amino acid
  MISC_FEATURE (148)..(148): Xaa can be any naturally occurring amino acid except Pro or Gly
  MISC_FEATURE (150)..(150): Xaa can be any naturally occurring amino acid
  MISC_FEATURE (151)..(151): Xaa can be any naturally occurring amino acid
  MISC_FEATURE (152)..(152): Xaa can be any naturally occurring amino acid
  MISC_FEATURE (154)..(154): Xaa can be any naturally occurring amino acid except Pro or Gly
  MISC_FEATURE (156)..(156): Xaa can be any naturally occurring amino acid
  MISC_FEATURE (157)..(157): Xaa can be any naturally occurring amino acid
  MISC_FEATURE (158)..(158): Xaa can be any naturally occurring amino acid
  MISC_FEATURE (160)..(160): Xaa can be any naturally occurring amino acid except Pro or Gly
  MISC_FEATURE (162)..(162): Xaa can be any naturally occurring amino acid
  MISC_FEATURE (163)..(163): Xaa can be any naturally occurring amino acid
  MISC_FEATURE (164)..(164): Xaa can be any naturally occurring amino acid
  MISC_FEATURE (166)..(166): Xaa can be any naturally occurring amino acid except Pro or Gly
  MISC_FEATURE (168)..(168): Xaa can be any naturally occurring amino acid
  MISC_FEATURE (169)..(169): Xaa can be any naturally occurring amino acid
  MISC_FEATURE (170)..(170): Xaa can be any naturally occurring amino acid
  MISC_FEATURE (172)..(172): Xaa can be any naturally occurring amino acid except Pro or Gly
  MISC_FEATURE (174)..(174): Xaa can be any naturally occurring amino acid
  MISC_FEATURE (175)..(175): Xaa can be any naturally occurring amino acid
  MISC_FEATURE (176)..(176): Xaa can be any naturally occurring amino acid
  MISC_FEATURE (178)..(178): Xaa can be any naturally occurring amino acid except Pro or Gly
  MISC_FEATURE (180)..(180): Xaa can be any naturally occurring amino acid
  MISC_FEATURE (181)..(181): Xaa can be any naturally occurring amino acid
  MISC_FEATURE (182)..(182): Xaa can be any naturally occurring amino acid
  MISC_FEATURE (184)..(184): Xaa can be any naturally occurring amino acid except Pro or Gly
  MISC_FEATURE (186)..(186): Xaa can be any naturally occurring amino acid
  MISC_FEATURE (187)..(187): Xaa can be any naturally occurring amino acid
  MISC_FEATURE (188)..(188): Xaa can be any naturally occurring amino acid
  MISC_FEATURE (190)..(190): Xaa can be any naturally occurring amino acid except Pro or Gly
  MISC_FEATURE (192)..(192): Xaa can be any naturally occurring amino acid
  MISC_FEATURE (193)..(193): Xaa can be any naturally occurring amino acid
  MISC_FEATURE (194)..(194): Xaa can be any naturally occurring amino acid
  MISC_FEATURE (196)..(196): Xaa can be any naturally occurring amino acid except Pro or Gly
  MISC_FEATURE (198)..(198): Xaa can be any naturally occurring amino acid
  MISC_FEATURE (199)..(199): Xaa can be any naturally occurring amino acid
  MISC_FEATURE (200)..(200): Xaa can be any naturally occurring amino acid
  MISC_FEATURE (202)..(202): Xaa can be any naturally occurring amino acid except Pro or Gly
  MISC_FEATURE (204)..(204): Xaa can be any naturally occurring amino acid
  MISC_FEATURE (205)..(205): Xaa can be any naturally occurring amino acid
  MISC_FEATURE (206)..(206): Xaa can be any naturally occurring amino acid
  MISC_FEATURE (208)..(208): Xaa can be any naturally occurring amino acid except Pro or Gly
  MISC_FEATURE (210)..(210): Xaa can be any naturally occurring amino acid
  MISC_FEATURE (211)..(211): Xaa can be any naturally occurring amino acid
  MISC_FEATURE (212)..(212): Xaa can be any naturally occurring amino acid
  MISC_FEATURE (214)..(214): Xaa can be any naturally occurring amino acid except Pro or Gly
  MISC_FEATURE (216)..(216): Xaa can be any naturally occurring amino acid
  MISC_FEATURE (217)..(217): Xaa can be any naturally occurring amino acid
  MISC_FEATURE (218)..(218): Xaa can be any naturally occurring amino acid
  MISC_FEATURE (220)..(220): Xaa can be any naturally occurring amino acid except Pro or Gly
  MISC_FEATURE (222)..(222): Xaa can be any naturally occurring amino acid
  MISC_FEATURE (223)..(223): Xaa can be any naturally occurring amino acid
  MISC_FEATURE (224)..(224): Xaa can be any naturally occurring amino acid
  MISC_FEATURE (226)..(226): Xaa can be any naturally occurring amino acid except Pro or Gly
  MISC_FEATURE (228)..(228): Xaa can be any naturally occurring amino acid
  MISC_FEATURE (229)..(229): Xaa can be any naturally occurring amino acid
  MISC_FEATURE (230)..(230): Xaa can be any naturally occurring amino acid
  MISC_FEATURE (232)..(232): Xaa can be any naturally occurring amino acid except Pro or Gly
  MISC_FEATURE (234)..(234): Xaa can be any naturally occurring amino acid
  MISC_FEATURE (235)..(235): Xaa can be any naturally occurring amino acid
  MISC_FEATURE (236)..(236): Xaa can be any naturally occurring amino acid
  MISC_FEATURE (238)..(238): Xaa can be any naturally occurring amino acid except Pro or Gly
  MISC_FEATURE (240)..(240): Xaa can be any naturally occurring amino acid
  MISC_FEATURE (241)..(241): Xaa can be any naturally occurring amino acid
  MISC_FEATURE (242)..(242): Xaa can be any naturally occurring amino acid
  MISC_FEATURE (244)..(244): Xaa can be any naturally occurring amino acid except Pro or Gly
  MISC_FEATURE (246)..(246): Xaa can be any naturally occurring amino acid
  MISC_FEATURE (247)..(247): Xaa can be any naturally occurring amino acid
  MISC_FEATURE (248)..(248): Xaa can be any naturally occurring amino acid
  MISC_FEATURE (250)..(250): Xaa can be any naturally occurring amino acid except Pro or Gly
  MISC_FEATURE (252)..(252): Xaa can be any naturally occurring amino acid
  MISC_FEATURE (253)..(253): Xaa can be any naturally occurring amino acid
  MISC_FEATURE (254)..(254): Xaa can be any naturally occurring amino acid
  MISC_FEATURE (256)..(256): Xaa can be any naturally occurring amino acid except Pro or Gly
  MISC_FEATURE (258)..(258): Xaa can be any naturally occurring amino acid
  MISC_FEATURE (259)..(259): Xaa can be any naturally occurring amino acid
  MISC_FEATURE (260)..(260): Xaa can be any naturally occurring amino acid
  MISC_FEATURE (262)..(262): Xaa can be any naturally occurring amino acid except Pro or Gly
  MISC_FEATURE (264)..(264): Xaa can be any naturally occurring amino acid
  MISC_FEATURE (265)..(265): Xaa can be any naturally occurring amino acid
  MISC_FEATURE (266)..(266): Xaa can be any naturally occurring amino acid
  MISC_FEATURE (268)..(268): Xaa can be any naturally occurring amino acid except Pro or Gly
  MISC_FEATURE (270)..(270): Xaa can be any naturally occurring amino acid
  MISC_FEATURE (271)..(271): Xaa can be any naturally occurring amino acid
  MISC_FEATURE (272)..(272): Xaa can be any naturally occurring amino acid
  MISC_FEATURE (274)..(274): Xaa can be any naturally occurring amino acid except Pro or Gly
  MISC_FEATURE (276)..(276): Xaa can be any naturally occurring amino acid
  MISC_FEATURE (277)..(277): Xaa can be any naturally occurring amino acid
  MISC_FEATURE (278)..(278): Xaa can be any naturally occurring amino acid
  MISC_FEATURE (280)..(280): Xaa can be any naturally occurring amino acid except Pro or Gly
  MISC_FEATURE (282)..(282): Xaa can be any naturally occurring amino acid
  MISC_FEATURE (283)..(283): Xaa can be any naturally occurring amino acid
  MISC_FEATURE (284)..(284): Xaa can be any naturally occurring amino acid
  MISC_FEATURE (286)..(286): Xaa can be any naturally occurring amino acid except Pro or Gly
  MISC_FEATURE (288)..(288): Xaa can be any naturally occurring amino acid
  MISC_FEATURE (289)..(289): Xaa can be any naturally occurring amino acid
  MISC_FEATURE (290)..(290): Xaa can be any naturally occurring amino acid
  MISC_FEATURE (292)..(292): Xaa can be any naturally occurring amino acid except Pro or Gly
  MISC_FEATURE (294)..(294): Xaa can be any naturally occurring amino acid
  MISC_FEATURE (295)..(295): Xaa can be any naturally occurring amino acid
  MISC_FEATURE (296)..(296): Xaa can be any naturally occurring amino acid
  MISC_FEATURE (298)..(298): Xaa can be any naturally occurring amino acid except Pro or Gly
  MISC_FEATURE (300)..(300): Xaa can be any naturally occurring amino acid
  MISC_FEATURE (301)..(301): Xaa can be any naturally occurring amino acid
  MISC_FEATURE (302)..(302): Xaa can be any naturally occurring amino acid
  MISC_FEATURE (304)..(304): Xaa can be any naturally occurring amino acid except Pro or Gly
  MISC_FEATURE (306)..(306): Xaa can be any naturally occurring amino acid
  MISC_FEATURE (307)..(307): Xaa can be any naturally occurring amino acid
  MISC_FEATURE (308)..(308): Xaa can be any naturally occurring amino acid
  MISC_FEATURE (310)..(310): Xaa can be any naturally occurring amino acid except Pro or Gly
  MISC_FEATURE (312)..(312): Xaa can be any naturally occurring amino acid
  MISC_FEATURE (313)..(313): Xaa can be any naturally occurring amino acid
  MISC_FEATURE (314)..(314): Xaa can be any naturally occurring amino acid
  MISC_FEATURE (316)..(316): Xaa can be any naturally occurring amino acid except Pro or Gly
  MISC_FEATURE (318)..(318): Xaa can be any naturally occurring amino acid
  MISC_FEATURE (319)..(319): Xaa can be any naturally occurring amino acid
  MISC_FEATURE (320)..(320): Xaa can be any naturally occurring amino acid
  MISC_FEATURE (322)..(322): Xaa can be any naturally occurring amino acid except Pro or Gly
  MISC_FEATURE (324)..(324): Xaa can be any naturally occurring amino acid
  MISC_FEATURE (325)..(325): Xaa can be any naturally occurring amino acid
  MISC_FEATURE (326)..(326): Xaa can be any naturally occurring amino acid
  MISC_FEATURE (328)..(328): Xaa can be any naturally occurring amino acid except Pro or Gly
  MISC_FEATURE (330)..(330): Xaa can be any naturally occurring amino acid
  MISC_FEATURE (331)..(331): Xaa can be any naturally occurring amino acid
  MISC_FEATURE (332)..(332): Xaa can be any naturally occurring amino acid
  MISC_FEATURE (334)..(334): Xaa can be any naturally occurring amino acid except Pro or Gly
  MISC_FEATURE (336)..(336): Xaa can be any naturally occurring amino acid
  MISC_FEATURE (337)..(337): Xaa can be any naturally occurring amino acid
  MISC_FEATURE (338)..(338): Xaa can be any naturally occurring amino acid
  MISC_FEATURE (340)..(340): Xaa can be any naturally occurring amino acid except Pro or Gly
  MISC_FEATURE (342)..(342): Xaa can be any naturally occurring amino acid
  MISC_FEATURE (343)..(343): Xaa can be any naturally occurring amino acid
  MISC_FEATURE (344)..(344): Xaa can be any naturally occurring amino acid
  MISC_FEATURE (346)..(346): Xaa can be any naturally occurring amino acid except Pro or Gly
  MISC_FEATURE (348)..(348): Xaa can be any naturally occurring amino acid
  MISC_FEATURE (349)..(349): Xaa can be any naturally occurring amino acid
  MISC_FEATURE (350)..(350): Xaa can be any naturally occurring amino acid
  MISC_FEATURE (352)..(352): Xaa can be any naturally occurring amino acid except Pro or Gly
  MISC_FEATURE (354)..(354): Xaa can be any naturally occurring amino acid
  MISC_FEATURE (355)..(355): Xaa can be any naturally occurring amino acid
  MISC_FEATURE (356)..(356): Xaa can be any naturally occurring amino acid
  MISC_FEATURE (358)..(358): Xaa can be any naturally occurring amino acid except Pro or Gly
  MISC_FEATURE (360)..(360): Xaa can be any naturally occurring amino acid
  MISC_FEATURE (361)..(361): Xaa can be any naturally occurring amino acid
  MISC_FEATURE (362)..(362): Xaa can be any naturally occurring amino acid
  MISC_FEATURE (364)..(364): Xaa can be any naturally occurring amino acid except Pro or Gly
  MISC_FEATURE (366)..(366): Xaa can be any naturally occurring amino acid
  MISC_FEATURE (367)..(367): Xaa can be any naturally occurring amino acid
  MISC_FEATURE (368)..(368): Xaa can be any naturally occurring amino acid
  MISC_FEATURE (370)..(370): Xaa can be any naturally occurring amino acid except Pro or Gly
  MISC_FEATURE (372)..(372): Xaa can be any naturally occurring amino acid
  MISC_FEATURE (373)..(373): Xaa can be any naturally occurring amino acid
  MISC_FEATURE (374)..(374): Xaa can be any naturally occurring amino acid
  MISC_FEATURE (376)..(376): Xaa can be any naturally occurring amino acid except Pro or Gly
  MISC_FEATURE (378)..(378): Xaa can be any naturally occurring amino acid
  MISC_FEATURE (379)..(379): Xaa can be any naturally occurring amino acid
  MISC_FEATURE (380)..(380): Xaa can be any naturally occurring amino acid
  MISC_FEATURE (382)..(382): Xaa can be any naturally occurring amino acid except Pro or Gly
  MISC_FEATURE (384)..(384): Xaa can be any naturally occurring amino acid
  MISC_FEATURE (385)..(385): Xaa can be any naturally occurring amino acid
  MISC_FEATURE (386)..(386): Xaa can be any naturally occurring amino acid
  MISC_FEATURE (388)..(388): Xaa can be any naturally occurring amino acid except Pro or Gly
  MISC_FEATURE (390)..(390): Xaa can be any naturally occurring amino acid
  MISC_FEATURE (391)..(391): Xaa can be any naturally occurring amino acid
  MISC_FEATURE (392)..(392): Xaa can be any naturally occurring amino acid
  MISC_FEATURE (394)..(394): Xaa can be any naturally occurring amino acid except Pro or Gly
  MISC_FEATURE (396)..(396): Xaa can be any naturally occurring amino acid
  MISC_FEATURE (397)..(397): Xaa can be any naturally occurring amino acid
  MISC_FEATURE (398)..(398): Xaa can be any naturally occurring amino acid
  MISC_FEATURE (400)..(400): Xaa can be any naturally occurring amino acid except Pro or Gly
  MISC_FEATURE (402)..(402): Xaa can be any naturally occurring amino acid
  MISC_FEATURE (403)..(403): Xaa can be any naturally occurring amino acid
  MISC_FEATURE (404)..(404): Xaa can be any naturally occurring amino acid
  MISC_FEATURE (406)..(406): Xaa can be any naturally occurring amino acid except Pro or Gly
  MISC_FEATURE (408)..(408): Xaa can be any naturally occurring amino acid
  MISC_FEATURE (409)..(409): Xaa can be any naturally occurring amino acid
  MISC_FEATURE (410)..(410): Xaa can be any naturally occurring amino acid
  MISC_FEATURE (412)..(412): Xaa can be any naturally occurring amino acid except Pro or Gly
  MISC_FEATURE (414)..(414): Xaa can be any naturally occurring amino acid
  MISC_FEATURE (415)..(415): Xaa can be any naturally occurring amino acid
  MISC_FEATURE (416)..(416): Xaa can be any naturally occurring amino acid
  MISC_FEATURE (418)..(418): Xaa can be any naturally occurring amino acid except Pro or Gly
  MISC_FEATURE (420)..(420): Xaa can be any naturally occurring amino acid
  MISC_FEATURE (421)..(421): Xaa can be any naturally occurring amino acid
  MISC_FEATURE (422)..(422): Xaa can be any naturally occurring amino acid
  MISC_FEATURE (424)..(424): Xaa can be any naturally occurring amino acid except Pro or Gly
  MISC_FEATURE (426)..(426): Xaa can be any naturally occurring amino acid
  MISC_FEATURE (427)..(427): Xaa can be any naturally occurring amino acid
  MISC_FEATURE (428)..(428): Xaa can be any naturally occurring amino acid
  MISC_FEATURE (430)..(430): Xaa can be any naturally occurring amino acid except Pro or Gly
  MISC_FEATURE (432)..(432): Xaa can be any naturally occurring amino acid
  MISC_FEATURE (433)..(433): Xaa can be any naturally occurring amino acid
  MISC_FEATURE (434)..(434): Xaa can be any naturally occurring amino acid
  MISC_FEATURE (436)..(436): Xaa can be any naturally occurring amino acid except Pro or Gly
  MISC_FEATURE (438)..(438): Xaa can be any naturally occurring amino acid
  MISC_FEATURE (439)..(439): Xaa can be any naturally occurring amino acid
  MISC_FEATURE (440)..(440): Xaa can be any naturally occurring amino acid
  MISC_FEATURE (442)..(442): Xaa can be any naturally occurring amino acid except Pro or Gly
  MISC_FEATURE (444)..(444): Xaa can be any naturally occurring amino acid
  MISC_FEATURE (445)..(445): Xaa can be any naturally occurring amino acid
  MISC_FEATURE (446)..(446): Xaa can be any naturally occurring amino acid
  MISC_FEATURE (448)..(448): Xaa can be any naturally occurring amino acid except Pro or Gly
  MISC_FEATURE (450)..(450): Xaa can be any naturally occurring amino acid
  MISC_FEATURE (451)..(451): Xaa can be any naturally occurring amino acid
  MISC_FEATURE (452)..(452): Xaa can be any naturally occurring amino acid
  MISC_FEATURE (454)..(454): Xaa can be any naturally occurring amino acid except Pro or Gly
  MISC_FEATURE (456)..(456): Xaa can be any naturally occurring amino acid
  MISC_FEATURE (457)..(457): Xaa can be any naturally occurring amino acid
  MISC_FEATURE (458)..(458): Xaa can be any naturally occurring amino acid
  MISC_FEATURE (460)..(460): Xaa can be any naturally occurring amino acid except Pro or Gly
  MISC_FEATURE (462)..(462): Xaa can be any naturally occurring amino acid
  MISC_FEATURE (463)..(463): Xaa can be any naturally occurring amino acid
  MISC_FEATURE (464)..(464): Xaa can be any naturally occurring amino acid
  MISC_FEATURE (466)..(466): Xaa can be any naturally occurring amino acid except Pro or Gly
  MISC_FEATURE (468)..(468): Xaa can be any naturally occurring amino acid
  MISC_FEATURE (469)..(469): Xaa can be any naturally occurring amino acid
  MISC_FEATURE (470)..(470): Xaa can be any naturally occurring amino acid
  MISC_FEATURE (472)..(472): Xaa can be any naturally occurring amino acid except Pro or Gly
  MISC_FEATURE (474)..(474): Xaa can be any naturally occurring amino acid
  MISC_FEATURE (475)..(475): Xaa can be any naturally occurring amino acid
  MISC_FEATURE (476)..(476): Xaa can be any naturally occurring amino acid
  MISC_FEATURE (478)..(478): Xaa can be any naturally occurring amino acid except Pro or Gly
  MISC_FEATURE (480)..(480): Xaa can be any naturally occurring amino acid
  MISC_FEATURE (481)..(481): Xaa can be any naturally occurring amino acid
  MISC_FEATURE (482)..(482): Xaa can be any naturally occurring amino acid
  MISC_FEATURE (484)..(484): Xaa can be any naturally occurring amino acid except Pro or Gly
  MISC_FEATURE (486)..(486): Xaa can be any naturally occurring amino acid
  MISC_FEATURE (487)..(487): Xaa can be any naturally occurring amino acid
  MISC_FEATURE (488)..(488): Xaa can be any naturally occurring amino acid
  MISC_FEATURE (490)..(490): Xaa can be any naturally occurring amino acid except Pro or Gly
  MISC_FEATURE (492)..(492): Xaa can be any naturally occurring amino acid
  MISC_FEATURE (493)..(493): Xaa can be any naturally occurring amino acid
  MISC_FEATURE (494)..(494): Xaa can be any naturally occurring amino acid
  MISC_FEATURE (496)..(496): Xaa can be any naturally occurring amino acid except Pro or Gly
  MISC_FEATURE (498)..(498): Xaa can be any naturally occurring amino acid
  MISC_FEATURE (499)..(499): Xaa can be any naturally occurring amino acid
  MISC_FEATURE (500)..(500): Xaa can be any naturally occurring amino acid
  MISC_FEATURE (502)..(502): Xaa can be any naturally occurring amino acid except Pro or Gly
  MISC_FEATURE (504)..(504): Xaa can be any naturally occurring amino acid
  MISC_FEATURE (505)..(505): Xaa can be any naturally occurring amino acid
  MISC_FEATURE (506)..(506): Xaa can be any naturally occurring amino acid
  MISC_FEATURE (508)..(508): Xaa can be any naturally occurring amino acid except Pro or Gly
  MISC_FEATURE (510)..(510): Xaa can be any naturally occurring amino acid
  MISC_FEATURE (511)..(511): Xaa can be any naturally occurring amino acid
  MISC_FEATURE (512)..(512): Xaa can be any naturally occurring amino acid
  MISC_FEATURE (514)..(514): Xaa can be any naturally occurring amino acid except Pro or Gly
  MISC_FEATURE (516)..(516): Xaa can be any naturally occurring amino acid
  MISC_FEATURE (517)..(517): Xaa can be any naturally occurring amino acid
  MISC_FEATURE (518)..(518): Xaa can be any naturally occurring amino acid
  MISC_FEATURE (520)..(520): Xaa can be any naturally occurring amino acid except Pro or Gly
  MISC_FEATURE (522)..(522): Xaa can be any naturally occurring amino acid
  MISC_FEATURE (523)..(523): Xaa can be any naturally occurring amino acid
  MISC_FEATURE (524)..(524): Xaa can be any naturally occurring amino acid
  MISC_FEATURE (526)..(526): Xaa can be any naturally occurring amino acid except Pro or Gly
  MISC_FEATURE (528)..(528): Xaa can be any naturally occurring amino acid
  MISC_FEATURE (529)..(529): Xaa can be any naturally occurring amino acid
  MISC_FEATURE (530)..(530): Xaa can be any naturally occurring amino acid
  MISC_FEATURE (532)..(532): Xaa can be any naturally occurring amino acid except Pro or Gly
  MISC_FEATURE (534)..(534): Xaa can be any naturally occurring amino acid
  MISC_FEATURE (535)..(535): Xaa can be any naturally occurring amino acid
  MISC_FEATURE (536)..(536): Xaa can be any naturally occurring amino acid
  MISC_FEATURE (538)..(538): Xaa can be any naturally occurring amino acid except Pro or Gly
  MISC_FEATURE (540)..(540): Xaa can be any naturally occurring amino acid
  MISC_FEATURE (541)..(541): Xaa can be any naturally occurring amino acid
  MISC_FEATURE (542)..(542): Xaa can be any naturally occurring amino acid
  MISC_FEATURE (544)..(544): Xaa can be any naturally occurring amino acid except Pro or Gly
  MISC_FEATURE (546)..(546): Xaa can be any naturally occurring amino acid
  MISC_FEATURE (547)..(547): Xaa can be any naturally occurring amino acid
  MISC_FEATURE (548)..(548): Xaa can be any naturally occurring amino acid
  MISC_FEATURE (550)..(550): Xaa can be any naturally occurring amino acid except Pro or Gly
  MISC_FEATURE (552)..(552): Xaa can be any naturally occurring amino acid
  MISC_FEATURE (553)..(553): Xaa can be any naturally occurring amino acid
  MISC_FEATURE (554)..(554): Xaa can be any naturally occurring amino acid
  MISC_FEATURE (556)..(556): Xaa can be any naturally occurring amino acid except Pro or Gly
  MISC_FEATURE (558)..(558): Xaa can be any naturally occurring amino acid
  MISC_FEATURE (559)..(559): Xaa can be any naturally occurring amino acid
  MISC_FEATURE (560)..(560): Xaa can be any naturally occurring amino acid
  MISC_FEATURE (562)..(562): Xaa can be any naturally occurring amino acid except Pro or Gly
  MISC_FEATURE (564)..(564): Xaa can be any naturally occurring amino acid
  MISC_FEATURE (565)..(565): Xaa can be any naturally occurring amino acid
  MISC_FEATURE (566)..(566): Xaa can be any naturally occurring amino acid
  MISC_FEATURE (568)..(568): Xaa can be any naturally occurring amino acid except Pro or Gly
  MISC_FEATURE (570)..(570): Xaa can be any naturally occurring amino acid
  MISC_FEATURE (571)..(571): Xaa can be any naturally occurring amino acid
  MISC_FEATURE (572)..(572): Xaa can be any naturally occurring amino acid
  MISC_FEATURE (574)..(574): Xaa can be any naturally occurring amino acid except Pro or Gly
  MISC_FEATURE (576)..(576): Xaa can be any naturally occurring amino acid
  MISC_FEATURE (577)..(577): Xaa can be any naturally occurring amino acid
  MISC_FEATURE (578)..(578): Xaa can be any naturally occurring amino acid
  MISC_FEATURE (580)..(580): Xaa can be any naturally occurring amino acid except Pro or Gly
  MISC_FEATURE (582)..(582): Xaa can be any naturally occurring amino acid
  MISC_FEATURE (583)..(583): Xaa can be any naturally occurring amino acid
  MISC_FEATURE (584)..(584): Xaa can be any naturally occurring amino acid
  MISC_FEATURE (586)..(586): Xaa can be any naturally occurring amino acid except Pro or Gly
  MISC_FEATURE (588)..(588): Xaa can be any naturally occurring amino acid
  MISC_FEATURE (589)..(589): Xaa can be any naturally occurring amino acid
  MISC_FEATURE (590)..(590): Xaa can be any naturally occurring amino acid
  MISC_FEATURE (592)..(592): Xaa can be any naturally occurring amino acid except Pro or Gly
  MISC_FEATURE (594)..(594): Xaa can be any naturally occurring amino acid
  MISC_FEATURE (595)..(595): Xaa can be any naturally occurring amino acid
  MISC_FEATURE (596)..(596): Xaa can be any naturally occurring amino acid
  MISC_FEATURE (598)..(598): Xaa can be any naturally occurring amino acid except Pro or Gly
  MISC_FEATURE (600)..(600): Xaa can be any naturally occurring amino acid
  MISC_FEATURE (601)..(601): Xaa can be any naturally occurring amino acid
  MISC_FEATURE (602)..(602): Xaa can be any naturally occurring amino acid
  MISC_FEATURE (604)..(604): Xaa can be any naturally occurring amino acid except Pro or Gly
  MISC_FEATURE (606)..(606): Xaa can be any naturally occurring amino acid
  MISC_FEATURE (607)..(607): Xaa can be any naturally occurring amino acid
  MISC_FEATURE (608)..(608): Xaa can be any naturally occurring amino acid
  MISC_FEATURE (610)..(610): Xaa can be any naturally occurring amino acid except Pro or Gly
  MISC_FEATURE (612)..(612): Xaa can be any naturally occurring amino acid
  MISC_FEATURE (613)..(613): Xaa can be any naturally occurring amino acid
  MISC_FEATURE (614)..(614): Xaa can be any naturally occurring amino acid
  MISC_FEATURE (616)..(616): Xaa can be any naturally occurring amino acid except Pro or Gly
  MISC_FEATURE (618)..(618): Xaa can be any naturally occurring amino acid
  MISC_FEATURE (619)..(619): Xaa can be any naturally occurring amino acid
  MISC_FEATURE (620)..(620): Xaa can be any naturally occurring amino acid
  MISC_FEATURE (622)..(622): Xaa can be any naturally occurring amino acid except Pro or Gly
  MISC_FEATURE (624)..(624): Xaa can be any naturally occurring amino acid
  MISC_FEATURE (625)..(625): Xaa can be any naturally occurring amino acid
  MISC_FEATURE (626)..(626): Xaa can be any naturally occurring amino acid
  MISC_FEATURE (628)..(628): Xaa can be any naturally occurring amino acid except Pro or Gly
  MISC_FEATURE (630)..(630): Xaa can be any naturally occurring amino acid
  MISC_FEATURE (631)..(631): Xaa can be any naturally occurring amino acid
  MISC_FEATURE (632)..(632): Xaa can be any naturally occurring amino acid
  MISC_FEATURE (634)..(634): Xaa can be any naturally occurring amino acid except Pro or Gly
  MISC_FEATURE (636)..(636): Xaa can be any naturally occurring amino acid
  MISC_FEATURE (637)..(637): Xaa can be any naturally occurring amino acid
  MISC_FEATURE (638)..(638): Xaa can be any naturally occurring amino acid
  MISC_FEATURE (640)..(640): Xaa can be any naturally occurring amino acid except Pro or Gly
  MISC_FEATURE (642)..(642): Xaa can be any naturally occurring amino acid
  MISC_FEATURE (643)..(643): Xaa can be any naturally occurring amino acid
  MISC_FEATURE (644)..(644): Xaa can be any naturally occurring amino acid
  MISC_FEATURE (646)..(646): Xaa can be any naturally occurring amino acid except Pro or Gly
  MISC_FEATURE (648)..(648): Xaa can be any naturally occurring amino acid
  MISC_FEATURE (649)..(649): Xaa can be any naturally occurring amino acid
  MISC_FEATURE (650)..(650): Xaa can be any naturally occurring amino acid
  MISC_FEATURE (652)..(652): Xaa can be any naturally occurring amino acid except Pro or Gly
  MISC_FEATURE (654)..(654): Xaa can be any naturally occurring amino acid
  MISC_FEATURE (655)..(655): Xaa can be any naturally occurring amino acid
  MISC_FEATURE (656)..(656): Xaa can be any naturally occurring amino acid
  MISC_FEATURE (658)..(658): Xaa can be any naturally occurring amino acid except Pro or Gly
  MISC_FEATURE (660)..(660): Xaa can be any naturally occurring amino acid
  MISC_FEATURE (661)..(661): Xaa can be any naturally occurring amino acid
  MISC_FEATURE (662)..(662): Xaa can be any naturally occurring amino acid
  MISC_FEATURE (664)..(664): Xaa can be any naturally occurring amino acid except Pro or Gly
  MISC_FEATURE (666)..(666): Xaa can be any naturally occurring amino acid
  MISC_FEATURE (667)..(667): Xaa can be any naturally occurring amino acid
  MISC_FEATURE (668)..(668): Xaa can be any naturally occurring amino acid
  MISC_FEATURE (670)..(670): Xaa can be any naturally occurring amino acid except Pro or Gly
  MISC_FEATURE (672)..(672): Xaa can be any naturally occurring amino acid
  MISC_FEATURE (673)..(673): Xaa can be any naturally occurring amino acid
  MISC_FEATURE (674)..(674): Xaa can be any naturally occurring amino acid
  MISC_FEATURE (676)..(676): Xaa can be any naturally occurring amino acid except Pro or Gly
  MISC_FEATURE (678)..(678): Xaa can be any naturally occurring amino acid
  MISC_FEATURE (679)..(679): Xaa can be any naturally occurring amino acid
  MISC_FEATURE (680)..(680): Xaa can be any naturally occurring amino acid
  MISC_FEATURE (682)..(682): Xaa can be any naturally occurring amino acid except Pro or Gly
  MISC_FEATURE (684)..(684): Xaa can be any naturally occurring amino acid
  MISC_FEATURE (685)..(685): Xaa can be any naturally occurring amino acid
  MISC_FEATURE (686)..(686): Xaa can be any naturally occurring amino acid
  MISC_FEATURE (688)..(688): Xaa can be any naturally occurring amino acid except Pro or Gly
  MISC_FEATURE (690)..(690): Xaa can be any naturally occurring amino acid
  MISC_FEATURE (691)..(691): Xaa can be any naturally occurring amino acid
  MISC_FEATURE (692)..(692): Xaa can be any naturally occurring amino acid
  MISC_FEATURE (694)..(694): Xaa can be any naturally occurring amino acid except Pro or Gly
  MISC_FEATURE (696)..(696): Xaa can be any naturally occurring amino acid
  MISC_FEATURE (697)..(697): Xaa can be any naturally occurring amino acid
  MISC_FEATURE (698)..(698): Xaa can be any naturally occurring amino acid
  MISC_FEATURE (700)..(700): Xaa can be any naturally occurring amino acid except Pro or Gly
  MISC_FEATURE (702)..(702): Xaa can be any naturally occurring amino acid
  MISC_FEATURE (703)..(703): Xaa can be any naturally occurring amino acid
  MISC_FEATURE (704)..(704): Xaa can be any naturally occurring amino acid
  MISC_FEATURE (706)..(706): Xaa can be any naturally occurring amino acid except Pro or Gly
  MISC_FEATURE (708)..(708): Xaa can be any naturally occurring amino acid
  MISC_FEATURE (709)..(709): Xaa can be any naturally occurring amino acid
  MISC_FEATURE (710)..(710): Xaa can be any naturally occurring amino acid
  MISC_FEATURE (712)..(712): Xaa can be any naturally occurring amino acid except Pro or Gly
  MISC_FEATURE (714)..(714): Xaa can be any naturally occurring amino acid
  MISC_FEATURE (715)..(715): Xaa can be any naturally occurring amino acid
  MISC_FEATURE (716)..(716): Xaa can be any naturally occurring amino acid
  MISC_FEATURE (718)..(718): Xaa can be any naturally occurring amino acid except Pro or Gly
  MISC_FEATURE (720)..(720): Xaa can be any naturally occurring amino acid
  MISC_FEATURE (721)..(721): Xaa can be any naturally occurring amino acid
  MISC_FEATURE (722)..(722): Xaa can be any naturally occurring amino acid
  MISC_FEATURE (724)..(724): Xaa can be any naturally occurring amino acid except Pro or Gly
  MISC_FEATURE (726)..(726): Xaa can be any naturally occurring amino acid
  MISC_FEATURE (727)..(727): Xaa can be any naturally occurring amino acid
  MISC_FEATURE (728)..(728): Xaa can be any naturally occurring amino acid
  MISC_FEATURE (730)..(730): Xaa can be any naturally occurring amino acid except Pro or Gly
  MISC_FEATURE (732)..(732): Xaa can be any naturally occurring amino acid
  MISC_FEATURE (733)..(733): Xaa can be any naturally occurring amino acid
  MISC_FEATURE (734)..(734): Xaa can be any naturally occurring amino acid
  MISC_FEATURE (736)..(736): Xaa can be any naturally occurring amino acid except Pro or Gly
  MISC_FEATURE (738)..(738): Xaa can be any naturally occurring amino acid
  MISC_FEATURE (739)..(739): Xaa can be any naturally occurring amino acid
  MISC_FEATURE (740)..(740): Xaa can be any naturally occurring amino acid
  MISC_FEATURE (742)..(742): Xaa can be any naturally occurring amino acid except Pro or Gly
  MISC_FEATURE (744)..(744): Xaa can be any naturally occurring amino acid
  MISC_FEATURE (745)..(745): Xaa can be any naturally occurring amino acid
  MISC_FEATURE (746)..(746): Xaa can be any naturally occurring amino acid
  MISC_FEATURE (748)..(748): Xaa can be any naturally occurring amino acid except Pro or Gly
  MISC_FEATURE (750)..(750): Xaa can be any naturally occurring amino acid
  MISC_FEATURE (751)..(751): Xaa can be any naturally occurring amino acid
  MISC_FEATURE (752)..(752): Xaa can be any naturally occurring amino acid
  MISC_FEATURE (754)..(754): Xaa can be any naturally occurring amino acid except Pro or Gly
  MISC_FEATURE (756)..(756): Xaa can be any naturally occurring amino acid
  MISC_FEATURE (757)..(757): Xaa can be any naturally occurring amino acid
  MISC_FEATURE (758)..(758): Xaa can be any naturally occurring amino acid
  MISC_FEATURE (760)..(760): Xaa can be any naturally occurring amino acid except Pro or Gly
  MISC_FEATURE (762)..(762): Xaa can be any naturally occurring amino acid
  MISC_FEATURE (763)..(763): Xaa can be any naturally occurring amino acid
  MISC_FEATURE (764)..(764): Xaa can be any naturally occurring amino acid
  MISC_FEATURE (766)..(766): Xaa can be any naturally occurring amino acid except Pro or Gly
  MISC_FEATURE (768)..(768): Xaa can be any naturally occurring amino acid
  MISC_FEATURE (769)..(769): Xaa can be any naturally occurring amino acid
  MISC_FEATURE (770)..(770): Xaa can be any naturally occurring amino acid
  MISC_FEATURE (772)..(772): Xaa can be any naturally occurring amino acid except Pro or Gly
  MISC_FEATURE (774)..(774): Xaa can be any naturally occurring amino acid
  MISC_FEATURE (775)..(775): Xaa can be any naturally occurring amino acid
  MISC_FEATURE (776)..(776): Xaa can be any naturally occurring amino acid
  MISC_FEATURE (778)..(778): Xaa can be any naturally occurring amino acid except Pro or Gly
  MISC_FEATURE (780)..(780): Xaa can be any naturally occurring amino acid
  MISC_FEATURE (781)..(781): Xaa can be any naturally occurring amino acid
  MISC_FEATURE (782)..(782): Xaa can be any naturally occurring amino acid
  MISC_FEATURE (784)..(784): Xaa can be any naturally occurring amino acid except Pro or Gly
  MISC_FEATURE (786)..(786): Xaa can be any naturally occurring amino acid
  MISC_FEATURE (787)..(787): Xaa can be any naturally occurring amino acid
  MISC_FEATURE (788)..(788): Xaa can be any naturally occurring amino acid
  MISC_FEATURE (790)..(790): Xaa can be any naturally occurring amino acid except Pro or Gly
  MISC_FEATURE (792)..(792): Xaa can be any naturally occurring amino acid
  MISC_FEATURE (793)..(793): Xaa can be any naturally occurring amino acid
  MISC_FEATURE (794)..(794): Xaa can be any naturally occurring amino acid
  MISC_FEATURE (796)..(796): Xaa can be any naturally occurring amino acid except Pro or Gly
  MISC_FEATURE (798)..(798): Xaa can be any naturally occurring amino acid
  MISC_FEATURE (799)..(799): Xaa can be any naturally occurring amino acid
  MISC_FEATURE (800)..(800): Xaa can be any naturally occurring amino acid
  MISC_FEATURE (802)..(802): Xaa can be any naturally occurring amino acid except Pro or Gly
  MISC_FEATURE (804)..(804): Xaa can be any naturally occurring amino acid
  MISC_FEATURE (805)..(805): Xaa can be any naturally occurring amino acid
  MISC_FEATURE (806)..(806): Xaa can be any naturally occurring amino acid
  MISC_FEATURE (808)..(808): Xaa can be any naturally occurring amino acid except Pro or Gly
  MISC_FEATURE (810)..(810): Xaa can be any naturally occurring amino acid
  MISC_FEATURE (811)..(811): Xaa can be any naturally occurring amino acid
  MISC_FEATURE (812)..(812): Xaa can be any naturally occurring amino acid
  MISC_FEATURE (814)..(814): Xaa can be any naturally occurring amino acid except Pro or Gly
  MISC_FEATURE (816)..(816): Xaa can be any naturally occurring amino acid
  MISC_FEATURE (817)..(817): Xaa can be any naturally occurring amino acid
  MISC_FEATURE (818)..(818): Xaa can be any naturally occurring amino acid
  MISC_FEATURE (820)..(820): Xaa can be any naturally occurring amino acid except Pro or Gly
  MISC_FEATURE (822)..(822): Xaa can be any naturally occurring amino acid
  MISC_FEATURE (823)..(823): Xaa can be any naturally occurring amino acid
  MISC_FEATURE (824)..(824): Xaa can be any naturally occurring amino acid
  MISC_FEATURE (826)..(826): Xaa can be any naturally occurring amino acid except Pro or Gly
  MISC_FEATURE (828)..(828): Xaa can be any naturally occurring amino acid
  MISC_FEATURE (829)..(829): Xaa can be any naturally occurring amino acid
  MISC_FEATURE (830)..(830): Xaa can be any naturally occurring amino acid
  MISC_FEATURE (832)..(832): Xaa can be any naturally occurring amino acid except Pro or Gly
  MISC_FEATURE (834)..(834): Xaa can be any naturally occurring amino acid
  MISC_FEATURE (835)..(835): Xaa can be any naturally occurring amino acid
  MISC_FEATURE (836)..(836): Xaa can be any naturally occurring amino acid
  MISC_FEATURE (838)..(838): Xaa can be any naturally occurring amino acid except Pro or Gly
  MISC_FEATURE (840)..(840): Xaa can be any naturally occurring amino acid
  MISC_FEATURE (841)..(841): Xaa can be any naturally occurring amino acid
  MISC_FEATURE (842)..(842): Xaa can be any naturally occurring amino acid
  MISC_FEATURE (844)..(844): Xaa can be any naturally occurring amino acid except Pro or Gly
  MISC_FEATURE (846)..(846): Xaa can be any naturally occurring amino acid
  MISC_FEATURE (847)..(847): Xaa can be any naturally occurring amino acid
  MISC_FEATURE (848)..(848): Xaa can be any naturally occurring amino acid
  MISC_FEATURE (850)..(850): Xaa can be any naturally occurring amino acid except Pro or Gly
  MISC_FEATURE (852)..(852): Xaa can be any naturally occurring amino acid
  MISC_FEATURE (853)..(853): Xaa can be any naturally occurring amino acid
  MISC_FEATURE (854)..(854): Xaa can be any naturally occurring amino acid
  MISC_FEATURE (856)..(856): Xaa can be any naturally occurring amino acid except Pro or Gly
  MISC_FEATURE (858)..(858): Xaa can be any naturally occurring amino acid
  MISC_FEATURE (859)..(859): Xaa can be any naturally occurring amino acid
  MISC_FEATURE (860)..(860): Xaa can be any naturally occurring amino acid
  MISC_FEATURE (862)..(862): Xaa can be any naturally occurring amino acid except Pro or Gly
  MISC_FEATURE (864)..(864): Xaa can be any naturally occurring amino acid
  MISC_FEATURE (865)..(865): Xaa can be any naturally occurring amino acid
  MISC_FEATURE (866)..(866): Xaa can be any naturally occurring amino acid
  MISC_FEATURE (868)..(868): Xaa can be any naturally occurring amino acid except Pro or Gly
  MISC_FEATURE (870)..(870): Xaa can be any naturally occurring amino acid
  MISC_FEATURE (871)..(871): Xaa can be any naturally occurring amino acid
  MISC_FEATURE (872)..(872): Xaa can be any naturally occurring amino acid
  MISC_FEATURE (874)..(874): Xaa can be any naturally occurring amino acid except Pro or Gly
  MISC_FEATURE (876)..(876): Xaa can be any naturally occurring amino acid
  MISC_FEATURE (877)..(877): Xaa can be any naturally occurring amino acid
  MISC_FEATURE (878)..(878): Xaa can be any naturally occurring amino acid
  MISC_FEATURE (880)..(880): Xaa can be any naturally occurring amino acid except Pro or Gly
  MISC_FEATURE (882)..(882): Xaa can be any naturally occurring amino acid
  MISC_FEATURE (883)..(883): Xaa can be any naturally occurring amino acid
  MISC_FEATURE (884)..(884): Xaa can be any naturally occurring amino acid
  MISC_FEATURE (886)..(886): Xaa can be any naturally occurring amino acid except Pro or Gly
  MISC_FEATURE (888)..(888): Xaa can be any naturally occurring amino acid
  MISC_FEATURE (889)..(889): Xaa can be any naturally occurring amino acid
  MISC_FEATURE (890)..(890): Xaa can be any naturally occurring amino acid
  MISC_FEATURE (892)..(892): Xaa can be any naturally occurring amino acid except Pro or Gly
  MISC_FEATURE (894)..(894): Xaa can be any naturally occurring amino acid
  MISC_FEATURE (895)..(895): Xaa can be any naturally occurring amino acid
  MISC_FEATURE (896)..(896): Xaa can be any naturally occurring amino acid
  MISC_FEATURE (898)..(898): Xaa can be any naturally occurring amino acid except Pro or Gly
  MISC_FEATURE (900)..(900): Xaa can be any naturally occurring amino acid
  MISC_FEATURE (901)..(901): Xaa can be any naturally occurring amino acid
  MISC_FEATURE (902)..(902): Xaa can be any naturally occurring amino acid
  MISC_FEATURE (904)..(904): Xaa can be any naturally occurring amino acid except Pro or Gly
  MISC_FEATURE (906)..(906): Xaa can be any naturally occurring amino acid
  MISC_FEATURE (907)..(907): Xaa can be any naturally occurring amino acid
  MISC_FEATURE (908)..(908): Xaa can be any naturally occurring amino acid
  MISC_FEATURE (910)..(910): Xaa can be any naturally occurring amino acid except Pro or Gly
  MISC_FEATURE (912)..(912): Xaa can be any naturally occurring amino acid
  MISC_FEATURE (913)..(913): Xaa can be any naturally occurring amino acid
  MISC_FEATURE (914)..(914): Xaa can be any naturally occurring amino acid
  MISC_FEATURE (916)..(916): Xaa can be any naturally occurring amino acid except Pro or Gly
  MISC_FEATURE (918)..(918): Xaa can be any naturally occurring amino acid
  MISC_FEATURE (919)..(919): Xaa can be any naturally occurring amino acid
  MISC_FEATURE (920)..(920): Xaa can be any naturally occurring amino acid
  MISC_FEATURE (922)..(922): Xaa can be any naturally occurring amino acid except Pro or Gly
  MISC_FEATURE (924)..(924): Xaa can be any naturally occurring amino acid
  MISC_FEATURE (925)..(925): Xaa can be any naturally occurring amino acid
  MISC_FEATURE (926)..(926): Xaa can be any naturally occurring amino acid
  MISC_FEATURE (928)..(928): Xaa can be any naturally occurring amino acid except Pro or Gly
  MISC_FEATURE (930)..(930): Xaa can be any naturally occurring amino acid
  MISC_FEATURE (931)..(931): Xaa can be any naturally occurring amino acid
  MISC_FEATURE (932)..(932): Xaa can be any naturally occurring amino acid
  MISC_FEATURE (934)..(934): Xaa can be any naturally occurring amino acid except Pro or Gly
  MISC_FEATURE (936)..(936): Xaa can be any naturally occurring amino acid
  MISC_FEATURE (937)..(937): Xaa can be any naturally occurring amino acid
  MISC_FEATURE (938)..(938): Xaa can be any naturally occurring amino acid
  MISC_FEATURE (940)..(940): Xaa can be any naturally occurring amino acid except Pro or Gly
  MISC_FEATURE (942)..(942): Xaa can be any naturally occurring amino acid
  MISC_FEATURE (943)..(943): Xaa can be any naturally occurring amino acid
  MISC_FEATURE (944)..(944): Xaa can be any naturally occurring amino acid
  MISC_FEATURE (946)..(946): Xaa can be any naturally occurring amino acid except Pro or Gly
  MISC_FEATURE (948)..(948): Xaa can be any naturally occurring amino acid
  MISC_FEATURE (949)..(949): Xaa can be any naturally occurring amino acid
  MISC_FEATURE (950)..(950): Xaa can be any naturally occurring amino acid
  MISC_FEATURE (952)..(952): Xaa can be any naturally occurring amino acid except Pro or Gly
  MISC_FEATURE (954)..(954): Xaa can be any naturally occurring amino acid
  MISC_FEATURE (955)..(955): Xaa can be any naturally occurring amino acid
  MISC_FEATURE (956)..(956): Xaa can be any naturally occurring amino acid
  MISC_FEATURE (958)..(958): Xaa can be any naturally occurring amino acid except Pro or Gly
  MISC_FEATURE (960)..(960): Xaa can be any naturally occurring amino acid
XXPXGXXXPXGXXXPXGXXXPXGXXXPXGXXXPXGXXXPXGXXXPXGXXXPXGXXXPXGXXXPXGXXXPXGXXXPXGXXXPXGXXXPXGXXXPXGXXXPXGXXXPXGXXXPXGXXXPXGXXXPXGXXXPXGXXXPXGXXXPXGXXXPXGXXXPXGXXXPXGXXXPXGXXXPXGXXXPXGXXXPXGXXXPXGXXXPXGXXXPXGXXXPXGXXXPXGXXXPXGXXXPXGXXXPXGXXXPXGXXXPXGXXXPXGXXXPXGXXXPXGXXXPXGXXXPXGXXXPXGXXXPXGXXXPXGXXXPXGXXXPXGXXXPXGXXXPXGXXXPXGXXXPXGXXXPXGXXXPXGXXXPXGXXXPXGXXXPXGXXXPXGXXXPXGXXXPXGXXXPXGXXXPXGXXXPXGXXXPXGXXXPXGXXXPXGXXXPXGXXXPXGXXXPXGXXXPXGXXXPXGXXXPXGXXXPXGXXXPXGXXXPXGXXXPXGXXXPXGXXXPXGXXXPXGXXXPXGXXXPXGXXXPXGXXXPXGXXXPXGXXXPXGXXXPXGXXXPXGXXXPXGXXXPXGXXXPXGXXXPXGXXXPXGXXXPXGXXXPXGXXXPXGXXXPXGXXXPXGXXXPXGXXXPXGXXXPXGXXXPXGXXXPXGXXXPXGXXXPXGXXXPXGXXXPXGXXXPXGXXXPXGXXXPXGXXXPXGXXXPXGXXXPXGXXXPXGXXXPXGXXXPXGXXXPXGXXXPXGXXXPXGXXXPXGXXXPXGXXXPXGXXXPXGXXXPXGXXXPXGXXXPXGXXXPXGXXXPXGXXXPXGXXXPXGXXXPXGXXXPXGXXXPXGXXXPXGXXXPXGXXXPXGXXXPXGXXXPXGXXXPXGXXXPXGXXXPXGXXXPXGXXXPXGXXXPXGXXXPXGXXXPXGXXXPXGXXXPXGXXXPXGXXXPXGXXXPXGXXXPXGXXXPXGXXXPXGXXXPXGXXXPXGXXXPXGXXXPXGX

SEQ ID NO: 58 - protein, 1120 aa, Artificial Sequence
  elastin-like polypeptide
  MISC_FEATURE (1)..(1): Xaa can be any naturally occurring amino acid
  MISC_FEATURE (2)..(2): Xaa can be any naturally occurring amino acid
  MISC_FEATURE (4)..(4): Xaa can be any naturally occurring amino acid except Pro or Gly
  MISC_FEATURE (5)..(5): Xaa can be any naturally occurring amino acid except Pro or Gly
  MISC_FEATURE (7)..(7): Xaa can be any naturally occurring amino acid
  MISC_FEATURE (8)..(8): Xaa can be any naturally occurring amino acid
  MISC_FEATURE (9)..(9): Xaa can be any naturally occurring amino acid
  MISC_FEATURE (11)..(11): Xaa can be any naturally occurring amino acid except Pro or Gly
  MISC_FEATURE (12)..(12): Xaa can be any naturally occurring amino acid except Pro or Gly
  MISC_FEATURE (14)..(14): Xaa can be any naturally occurring amino acid
  MISC_FEATURE (15)..(15): Xaa can be any naturally occurring amino acid
  MISC_FEATURE (16)..(16): Xaa can be any naturally occurring amino acid
  MISC_FEATURE (18)..(18): Xaa can be any naturally occurring amino acid except Pro or Gly
  MISC_FEATURE (19)..(19): Xaa can be any naturally occurring amino acid except Pro or Gly
  MISC_FEATURE (21)..(21): Xaa can be any naturally occurring amino acid
  MISC_FEATURE (22)..(22): Xaa can be any naturally occurring amino acid
  MISC_FEATURE (23)..(23): Xaa can be any naturally occurring amino acid
  MISC_FEATURE (25)..(25): Xaa can be any naturally occurring amino acid except Pro or Gly
  MISC_FEATURE (26)..(26): Xaa can be any naturally occurring amino acid except Pro or Gly
  MISC_FEATURE (28)..(28): Xaa can be any naturally occurring amino acid
  MISC_FEATURE (29)..(29): Xaa can be any naturally occurring amino acid
  MISC_FEATURE (30)..(30): Xaa can be any naturally occurring amino acid
  MISC_FEATURE (32)..(32): Xaa can be any naturally occurring amino acid except Pro or Gly
  MISC_FEATURE (33)..(33): Xaa can be any naturally occurring amino acid except Pro or Gly
  MISC_FEATURE (35)..(35): Xaa can be any naturally occurring amino acid
  MISC_FEATURE (36)..(36): Xaa can be any naturally occurring amino acid
  MISC_FEATURE (37)..(37): Xaa can be any naturally occurring amino acid
  MISC_FEATURE (39)..(39): Xaa can be any naturally occurring amino acid except Pro or Gly
  MISC_FEATURE (40)..(40): Xaa can be any naturally occurring amino acid except Pro or Gly
  MISC_FEATURE (42)..(42): Xaa can be any naturally occurring amino acid
  MISC_FEATURE (43)..(43): Xaa can be any naturally occurring amino acid
  MISC_FEATURE (44)..(44): Xaa can be any naturally occurring amino acid
  MISC_FEATURE (46)..(46): Xaa can be any naturally occurring amino acid except Pro or Gly
  MISC_FEATURE (47)..(47): Xaa can be any naturally occurring amino acid except Pro or Gly
  MISC_FEATURE (49)..(49): Xaa can be any naturally occurring amino acid
  MISC_FEATURE (50)..(50): Xaa can be any naturally occurring amino acid
  MISC_FEATURE (51)..(51): Xaa can be any naturally occurring amino acid
  MISC_FEATURE (53)..(53): Xaa can be any naturally occurring amino acid except Pro or Gly
  MISC_FEATURE (54)..(54): Xaa can be any naturally occurring amino acid except Pro or Gly
  MISC_FEATURE (56)..(56): Xaa can be any naturally occurring amino acid
  MISC_FEATURE (57)..(57): Xaa can be any naturally occurring amino acid
  MISC_FEATURE (58)..(58): Xaa can be any naturally occurring amino acid
  MISC_FEATURE (60)..(60): Xaa can be any naturally occurring amino acid except Pro or Gly
  MISC_FEATURE (61)..(61): Xaa can be any naturally occurring amino acid except Pro or Gly
  MISC_FEATURE (63)..(63): Xaa can be any naturally occurring amino acid
  MISC_FEATURE (64)..(64): Xaa can be any naturally occurring amino acid
  MISC_FEATURE (65)..(65): Xaa can be any naturally occurring amino acid
  MISC_FEATURE (67)..(67): Xaa can be any naturally occurring amino acid except Pro or Gly
  MISC_FEATURE (68)..(68): Xaa can be any naturally occurring amino acid except Pro or Gly
  MISC_FEATURE (70)..(70): Xaa can be any naturally occurring amino acid
  MISC_FEATURE (71)..(1120): May be present or absent in groups of the repeat unit Xaa Xaa Pro Xaa Xaa Gly Xaa
  MISC_FEATURE (71)..(71): Xaa can be any naturally occurring amino acid
  MISC_FEATURE (72)..(72): Xaa can be any naturally occurring amino acid
  MISC_FEATURE (74)..(74): Xaa can be any naturally occurring amino acid except Pro or Gly
  MISC_FEATURE (75)..(75): Xaa can be any naturally occurring amino acid except Pro or Gly
  MISC_FEATURE (77)..(77): Xaa can be any naturally occurring amino acid
  MISC_FEATURE (78)..(78): Xaa can be any naturally occurring amino acid
  MISC_FEATURE (79)..(79): Xaa can be any naturally occurring amino acid
  MISC_FEATURE (81)..(81): Xaa can be any naturally occurring amino acid except Pro or Gly
  MISC_FEATURE (82)..(82): Xaa can be any naturally occurring amino acid except Pro or Gly
  MISC_FEATURE (84)..(84): Xaa can be any naturally occurring amino acid
  MISC_FEATURE (85)..(85): Xaa can be any naturally occurring amino acid
  MISC_FEATURE (86)..(86): Xaa can be any naturally occurring amino acid
  MISC_FEATURE (88)..(88): Xaa can be any naturally occurring amino acid except Pro or Gly
  MISC_FEATURE (89)..(89): Xaa can be any naturally occurring amino acid except Pro or Gly
  MISC_FEATURE (91)..(91): Xaa can be any naturally occurring amino acid
  MISC_FEATURE (92)..(92): Xaa can be any naturally occurring amino acid
  MISC_FEATURE (93)..(93): Xaa can be any naturally occurring amino acid
  MISC_FEATURE (95)..(95): Xaa can be any naturally occurring amino acid except Pro or Gly
  MISC_FEATURE (96)..(96): Xaa can be any naturally occurring amino acid except Pro or Gly
  MISC_FEATURE (98)..(98): Xaa can be any naturally occurring amino acid
  MISC_FEATURE (99)..(99): Xaa can be any naturally occurring amino acid
  MISC_FEATURE (100)..(100): Xaa can be any naturally occurring amino acid
  MISC_FEATURE (102)..(102): Xaa can be any naturally occurring amino acid except Pro or Gly
  MISC_FEATURE (103)..(103): Xaa can be any naturally occurring amino acid except Pro or Gly
  MISC_FEATURE (105)..(105): Xaa can be any naturally occurring amino acid
  MISC_FEATURE (106)..(106): Xaa can be any naturally occurring amino acid
  MISC_FEATURE (107)..(107): Xaa can be any naturally occurring amino acid
  MISC_FEATURE (109)..(109): Xaa can be any naturally occurring amino acid except Pro or Gly
  MISC_FEATURE (110)..(110): Xaa can be any naturally occurring amino acid except Pro or Gly
  MISC_FEATURE (112)..(112): Xaa can be any naturally occurring amino acid
  MISC_FEATURE (113)..(113): Xaa can be any naturally occurring amino acid
  MISC_FEATURE (114)..(114): Xaa can be any naturally occurring amino acid
  MISC_FEATURE (116)..(116): Xaa can be any naturally occurring amino acid except Pro or Gly
  MISC_FEATURE (117)..(117): Xaa can be any naturally occurring amino acid except Pro or Gly
  MISC_FEATURE (119)..(119): Xaa can be any naturally occurring amino acid
  MISC_FEATURE (120)..(120): Xaa can be any naturally occurring amino acid
  MISC_FEATURE (121)..(121): Xaa can be any naturally occurring amino acid
  MISC_FEATURE (123)..(123): Xaa can be any naturally occurring amino acid except Pro or Gly
  MISC_FEATURE (124)..(124): Xaa can be any naturally occurring amino acid except Pro or Gly
  MISC_FEATURE (126)..(126): Xaa can be any naturally occurring amino acid
  MISC_FEATURE (127)..(127): Xaa can be any naturally occurring amino acid
  MISC_FEATURE (128)..(128): Xaa can be any naturally occurring amino acid
  MISC_FEATURE (130)..(130): Xaa can be any naturally occurring amino acid except Pro or Gly
  MISC_FEATURE (131)..(131): Xaa can be any naturally occurring amino acid except Pro or Gly
  MISC_FEATURE (133)..(133): Xaa can be any naturally occurring amino acid
  MISC_FEATURE (134)..(134): Xaa can be any naturally occurring amino acid
  MISC_FEATURE (135)..(135): Xaa can be any naturally occurring amino acid
  MISC_FEATURE (137)..(137): Xaa can be any naturally occurring amino acid except Pro or Gly
  MISC_FEATURE (138)..(138): Xaa can be any naturally occurring amino acid except Pro or Gly
  MISC_FEATURE (140)..(140): Xaa can be any naturally occurring amino acid
  MISC_FEATURE (141)..(141): Xaa can be any naturally occurring amino acid
  MISC_FEATURE (142)..(142): Xaa can be any naturally occurring amino acid
  MISC_FEATURE (144)..(144): Xaa can be any naturally occurring amino acid except Pro or Gly
  MISC_FEATURE (145)..(145): Xaa can be any naturally occurring amino acid except Pro or Gly
  MISC_FEATURE (147)..(147): Xaa can be any naturally occurring amino acid
  MISC_FEATURE (148)..(148): Xaa can be any naturally occurring amino acid
  MISC_FEATURE (149)..(149): Xaa can be any naturally occurring amino acid
  MISC_FEATURE (151)..(151): Xaa can be any naturally occurring amino acid except Pro or Gly
  MISC_FEATURE (152)..(152): Xaa can be any naturally occurring amino acid except Pro or Gly
  MISC_FEATURE (154)..(154): Xaa can be any naturally occurring amino acid
  MISC_FEATURE (155)..(155): Xaa can be any naturally occurring amino acid
  MISC_FEATURE (156)..(156): Xaa can be any naturally occurring amino acid
  MISC_FEATURE (158)..(158): Xaa can be any naturally occurring amino acid except Pro or Gly
  MISC_FEATURE (159)..(159): Xaa can be any naturally occurring amino acid except Pro or Gly
  MISC_FEATURE (161)..(161): Xaa can be any naturally occurring amino acid
  MISC_FEATURE (162)..(162): Xaa can be any naturally occurring amino acid
  MISC_FEATURE (163)..(163): Xaa can be any naturally occurring amino acid
  MISC_FEATURE (165)..(165): Xaa can be any naturally occurring amino acid except Pro or Gly
  MISC_FEATURE (166)..(166): Xaa can be any naturally occurring amino acid except Pro or Gly
  MISC_FEATURE (168)..(168): Xaa can be any naturally occurring amino acid
  MISC_FEATURE (169)..(169): Xaa can be any naturally occurring amino acid
  MISC_FEATURE (170)..(170): Xaa can be any naturally occurring amino acid
  MISC_FEATURE (172)..(172): Xaa can be any naturally occurring amino acid except Pro or Gly
  MISC_FEATURE (173)..(173): Xaa can be any naturally occurring amino acid except Pro or Gly
  MISC_FEATURE (175)..(175): Xaa can be any naturally occurring amino acid
  MISC_FEATURE (176)..(176): Xaa can be any naturally occurring amino acid
  MISC_FEATURE (177)..(177): Xaa can be any naturally occurring amino acid
  MISC_FEATURE (179)..(179): Xaa can be any naturally occurring amino acid except Pro or Gly
  MISC_FEATURE (180)..(180): Xaa can be any naturally occurring amino acid except Pro or Gly
  MISC_FEATURE (182)..(182): Xaa can be any naturally occurring amino acid
  MISC_FEATURE (183)..(183): Xaa can be any naturally occurring amino acid
  MISC_FEATURE (184)..(184): Xaa can be any naturally occurring amino acid
  MISC_FEATURE (186)..(186): Xaa can be any naturally occurring amino acid except Pro or Gly
  MISC_FEATURE (187)..(187): Xaa can be any naturally occurring amino acid except Pro or Gly
  MISC_FEATURE (189)..(189): Xaa can be any naturally occurring amino acid
  MISC_FEATURE (190)..(190): Xaa can be any naturally occurring amino acid
  MISC_FEATURE (191)..(191): Xaa can be any naturally occurring amino acid
  MISC_FEATURE (193)..(193): Xaa can be any naturally occurring amino acid except Pro or Gly
  MISC_FEATURE (194)..(194): Xaa can be any naturally occurring amino acid except Pro or Gly
  MISC_FEATURE (196)..(196): Xaa can be any naturally occurring amino acid
  MISC_FEATURE (197)..(197): Xaa can be any naturally occurring amino acid
  MISC_FEATURE (198)..(198): Xaa can be any naturally occurring amino acid
  MISC_FEATURE (200)..(200): Xaa can be any naturally occurring amino acid except Pro or Gly
  MISC_FEATURE (201)..(201): Xaa can be any naturally occurring amino acid except Pro or Gly
  MISC_FEATURE (203)..(203): Xaa can be any naturally occurring amino acid
  MISC_FEATURE (204)..(204): Xaa can be any naturally occurring amino acid
  MISC_FEATURE (205)..(205): Xaa can be any naturally occurring amino acid
  MISC_FEATURE (207)..(207): Xaa can be any naturally occurring amino acid except Pro or Gly
  MISC_FEATURE (208)..(208): Xaa can be any naturally occurring amino acid except Pro or Gly
  MISC_FEATURE (210)..(210): Xaa can be any naturally occurring amino acid
  MISC_FEATURE (211)..(211): Xaa can be any naturally occurring amino acid
  MISC_FEATURE (212)..(212): Xaa can be any naturally occurring amino acid
  MISC_FEATURE (214)..(214): Xaa can be any naturally occurring amino acid except Pro or Gly
  MISC_FEATURE (215)..(215): Xaa can be any naturally occurring amino acid except Pro or Gly
  MISC_FEATURE (217)..(217): Xaa can be any naturally occurring amino acid
  MISC_FEATURE (218)..(218): Xaa can be any naturally occurring amino acid
  MISC_FEATURE (219)..(219): Xaa can be any naturally occurring amino acid
  MISC_FEATURE (221)..(221): Xaa can be any naturally occurring amino acid except Pro or Gly
  MISC_FEATURE (222)..(222): Xaa can be any naturally occurring amino acid except Pro or Gly
  MISC_FEATURE (224)..(224): Xaa can be any naturally occurring amino acid
  MISC_FEATURE (225)..(225): Xaa can be any naturally occurring amino acid
  MISC_FEATURE (226)..(226): Xaa can be any naturally occurring amino acid
  MISC_FEATURE (228)..(228): Xaa can be any naturally occurring amino acid except Pro or Gly
  MISC_FEATURE (229)..(229): Xaa can be any naturally occurring amino acid except Pro or Gly
  MISC_FEATURE (231)..(231): Xaa can be any naturally occurring amino acid
  MISC_FEATURE (232)..(232): Xaa can be any naturally occurring amino acid
  MISC_FEATURE (233)..(233): Xaa can be any naturally occurring amino acid
  MISC_FEATURE (235)..(235): Xaa can be any naturally occurring amino acid except Pro or Gly
  MISC_FEATURE (236)..(236): Xaa can be any naturally occurring amino acid except Pro or Gly
  MISC_FEATURE (238)..(238): Xaa can be any naturally occurring amino acid
  MISC_FEATURE (239)..(239): Xaa can be any naturally occurring amino acid
  MISC_FEATURE (240)..(240): Xaa can be any naturally occurring amino acid
  MISC_FEATURE (242)..(242): Xaa can be any naturally occurring amino acid except Pro or Gly
  MISC_FEATURE (243)..(243): Xaa can be any naturally occurring amino acid except Pro or Gly
  MISC_FEATURE (245)..(245): Xaa can be any naturally occurring amino acid
  MISC_FEATURE (246)..(246): Xaa can be any naturally occurring amino acid
  MISC_FEATURE (247)..(247): Xaa can be any naturally occurring amino acid
  MISC_FEATURE (249)..(249): Xaa can be any naturally occurring amino acid except Pro or Gly
  MISC_FEATURE (250)..(250): Xaa can be any naturally occurring amino acid except Pro or Gly
  MISC_FEATURE (252)..(252): Xaa can be any naturally occurring amino acid
  MISC_FEATURE (253)..(253): Xaa can be any naturally occurring amino acid
  MISC_FEATURE (254)..(254): Xaa can be any naturally occurring amino acid
  MISC_FEATURE (256)..(256): Xaa can be any naturally occurring amino acid except Pro or Gly
  MISC_FEATURE (257)..(257): Xaa can be any naturally occurring amino acid except Pro or Gly
  MISC_FEATURE (259)..(259): Xaa can be any naturally occurring amino acid
  MISC_FEATURE (260)..(260): Xaa can be any naturally occurring amino acid
  MISC_FEATURE (261)..(261): Xaa can be any naturally occurring amino acid
  MISC_FEATURE (263)..(263): Xaa can be any naturally occurring amino acid except Pro or Gly
  MISC_FEATURE (264)..(264): Xaa can be any naturally occurring amino acid except Pro or Gly
  MISC_FEATURE (266)..(266): Xaa can be any naturally occurring amino acid
  MISC_FEATURE (267)..(267): Xaa can be any naturally occurring amino acid
  MISC_FEATURE (268)..(268): Xaa can be any naturally occurring amino acid
  MISC_FEATURE (270)..(270): Xaa can be any naturally occurring amino acid except Pro or Gly
  MISC_FEATURE (271)..(271): Xaa can be any naturally occurring amino acid except Pro or Gly
  MISC_FEATURE (273)..(273): Xaa can be any naturally occurring amino acid
  MISC_FEATURE (274)..(274): Xaa can be any naturally occurring amino acid
  MISC_FEATURE (275)..(275): Xaa can be any naturally occurring amino acid
  MISC_FEATURE (277)..(277): Xaa can be any naturally occurring amino acid except Pro or Gly
  MISC_FEATURE (278)..(278): Xaa can be any naturally occurring amino acid except Pro or Gly
  MISC_FEATURE (280)..(280): Xaa can be any naturally occurring amino acid
  MISC_FEATURE (281)..(281): Xaa can be any naturally occurring amino acid
  MISC_FEATURE (282)..(282): Xaa can be any naturally occurring amino acid
  MISC_FEATURE (284)..(284): Xaa can be any naturally occurring amino acid except Pro or Gly
  MISC_FEATURE (285)..(285): Xaa can be any naturally occurring amino acid except Pro or Gly
  MISC_FEATURE (287)..(287): Xaa can be any naturally occurring amino acid
  MISC_FEATURE (288)..(288): Xaa can be any naturally occurring amino acid
  MISC_FEATURE (289)..(289): Xaa can be any naturally occurring amino acid
  MISC_FEATURE (291)..(291): Xaa can be any naturally occurring amino acid except Pro or Gly
  MISC_FEATURE (292)..(292): Xaa can be any naturally occurring amino acid except Pro or Gly
  MISC_FEATURE (294)..(294): Xaa can be any naturally occurring amino acid
  MISC_FEATURE (295)..(295): Xaa can be any naturally occurring amino acid
  MISC_FEATURE (296)..(296): Xaa can be any naturally occurring amino acid
  MISC_FEATURE (298)..(298): Xaa can be any naturally occurring amino acid except Pro or Gly
  MISC_FEATURE (299)..(299): Xaa can be any naturally occurring amino acid except Pro or Gly
  MISC_FEATURE (301)..(301): Xaa can be any naturally occurring amino acid
  MISC_FEATURE (302)..(302): Xaa can be any naturally occurring amino acid
  MISC_FEATURE (303)..(303): Xaa can be any naturally occurring amino acid
  MISC_FEATURE (305)..(305): Xaa can be any naturally occurring amino acid except Pro or Gly
  MISC_FEATURE (306)..(306): Xaa can be any naturally occurring amino acid except Pro or Gly
  MISC_FEATURE (308)..(308): Xaa can be any naturally occurring amino acid
  MISC_FEATURE (309)..(309): Xaa can be any naturally occurring amino acid
  MISC_FEATURE (310)..(310): Xaa can be any naturally occurring amino acid
  MISC_FEATURE (312)..(312): Xaa can be any naturally occurring amino acid except Pro or Gly
  MISC_FEATURE (313)..(313): Xaa can be any naturally occurring amino acid except Pro or Gly
  MISC_FEATURE (315)..(315): Xaa can be any naturally occurring amino acid
  MISC_FEATURE (316)..(316): Xaa can be any naturally occurring amino acid
  MISC_FEATURE (317)..(317): Xaa can be any naturally occurring amino acid
  MISC_FEATURE (319)..(319): Xaa can be any naturally occurring amino acid except Pro or Gly
  MISC_FEATURE (320)..(320): Xaa can be any naturally occurring amino acid except Pro or Gly
  MISC_FEATURE (322)..(322): Xaa can be any naturally occurring amino acid
  MISC_FEATURE (323)..(323): Xaa can be any naturally occurring amino acid
  MISC_FEATURE (324)..(324): Xaa can be any naturally occurring amino acid
  MISC_FEATURE (326)..(326): Xaa can be any naturally occurring amino acid except Pro or Gly
  MISC_FEATURE (327)..(327): Xaa can be any naturally occurring amino acid except Pro or Gly
  MISC_FEATURE (329)..(329): Xaa can be any naturally occurring amino acid
  MISC_FEATURE (330)..(330): Xaa can be any naturally occurring amino acid
  MISC_FEATURE (331)..(331): Xaa can be any naturally occurring amino acid
  MISC_FEATURE (333)..(333): Xaa can be any naturally occurring amino acid except Pro or Gly
  MISC_FEATURE (334)..(334): Xaa can be any naturally occurring amino acid except Pro or Gly
  MISC_FEATURE (336)..(336): Xaa can be any naturally occurring amino acid
  MISC_FEATURE (337)..(337): Xaa can be any naturally occurring amino acid
  MISC_FEATURE (338)..(338): Xaa can be any naturally occurring amino acid
  MISC_FEATURE (340)..(340): Xaa can be any naturally occurring amino acid except Pro or Gly
  MISC_FEATURE (341)..(341): Xaa can be any naturally occurring amino acid except Pro or Gly
  MISC_FEATURE (343)..(343): Xaa can be any naturally occurring amino acid
  MISC_FEATURE (344)..(344): Xaa can be any naturally occurring amino acid
  MISC_FEATURE (345)..(345): Xaa can be any naturally occurring amino acid
  MISC_FEATURE (347)..(347): Xaa can be any naturally occurring amino acid except Pro or Gly
  MISC_FEATURE (348)..(348): Xaa can be any naturally occurring amino acid except Pro or Gly
  MISC_FEATURE (350)..(350): Xaa can be any naturally occurring amino acid
  MISC_FEATURE (351)..(351): Xaa can be any naturally occurring amino acid
  MISC_FEATURE (352)..(352): Xaa can be any naturally occurring amino acid
  MISC_FEATURE (354)..(354): Xaa can be any naturally occurring amino acid except Pro or Gly
  MISC_FEATURE (355)..(355): Xaa can be any naturally occurring amino acid except Pro or Gly
  MISC_FEATURE (357)..(357): Xaa can be any naturally occurring amino acid
  MISC_FEATURE (358)..(358): Xaa can be any naturally occurring amino acid
  MISC_FEATURE (359)..(359): Xaa can be any naturally occurring amino acid
  MISC_FEATURE (361)..(361): Xaa can be any naturally occurring amino acid except Pro or Gly
  MISC_FEATURE (362)..(362): Xaa can be any naturally occurring amino acid except Pro or Gly
  MISC_FEATURE (364)..(364): Xaa can be any naturally occurring amino acid
  MISC_FEATURE (365)..(365): Xaa can be any naturally occurring amino acid
  MISC_FEATURE (366)..(366): Xaa can be any naturally occurring amino acid
  MISC_FEATURE (368)..(368): Xaa can be any naturally occurring amino acid except Pro or Gly
  MISC_FEATURE (369)..(369): Xaa can be any naturally occurring amino acid except Pro or Gly
  MISC_FEATURE (371)..(371): Xaa can be any naturally occurring amino acid
  MISC_FEATURE (372)..(372): Xaa can be any naturally occurring amino acid
  MISC_FEATURE (373)..(373): Xaa can be any naturally occurring amino acid
  MISC_FEATURE (375)..(375): Xaa can be any naturally occurring amino acid except Pro or Gly
  MISC_FEATURE (376)..(376): Xaa can be any naturally occurring amino acid except Pro or Gly
  MISC_FEATURE (378)..(378): Xaa can be any naturally occurring amino acid
  MISC_FEATURE (379)..(379): Xaa can be any naturally occurring amino acid
  MISC_FEATURE (380)..(380): Xaa can be any naturally occurring amino acid
  MISC_FEATURE (382)..(382): Xaa can be any naturally occurring amino acid except Pro or Gly
  MISC_FEATURE (383)..(383): Xaa can be any naturally occurring amino acid except Pro or Gly
  MISC_FEATURE (385)..(385): Xaa can be any naturally occurring amino acid
  MISC_FEATURE (386)..(386): Xaa can be any naturally occurring amino acid
  MISC_FEATURE (387)..(387): Xaa can be any naturally occurring amino acid
  MISC_FEATURE (389)..(389): Xaa can be any naturally occurring amino acid except Pro or Gly
  MISC_FEATURE (390)..(390): Xaa can be any naturally occurring amino acid except Pro or Gly
  MISC_FEATURE (392)..(392): Xaa can be any naturally occurring amino acid
  MISC_FEATURE (393)..(393): Xaa can be any naturally occurring amino acid
  MISC_FEATURE (394)..(394): Xaa can be any naturally occurring amino acid
  MISC_FEATURE (396)..(396): Xaa can be any naturally occurring amino acid except Pro or Gly
  MISC_FEATURE (397)..(397): Xaa can be any naturally occurring amino acid except Pro or Gly
  MISC_FEATURE (399)..(399): Xaa can be any naturally occurring amino acid
  MISC_FEATURE (400)..(400): Xaa can be any naturally occurring amino acid
  MISC_FEATURE (401)..(401): Xaa can be any naturally occurring amino acid
  MISC_FEATURE (403)..(403): Xaa can be any naturally occurring amino acid except Pro or Gly
  MISC_FEATURE (404)..(404): Xaa can be any naturally occurring amino acid except Pro or Gly
  MISC_FEATURE (406)..(406): Xaa can be any naturally occurring amino acid
  MISC_FEATURE (407)..(407): Xaa can be any naturally occurring amino acid
  MISC_FEATURE (408)..(408): Xaa can be any naturally occurring amino acid
  MISC_FEATURE (410)..(410): Xaa can be any naturally occurring amino acid except Pro or Gly
  MISC_FEATURE (411)..(411): Xaa can be any naturally occurring amino acid except Pro or Gly
  MISC_FEATURE (413)..(413): Xaa can be any naturally occurring amino acid
  MISC_FEATURE (414)..(414): Xaa can be any naturally occurring amino acid
  MISC_FEATURE (415)..(415): Xaa can be any naturally occurring amino acid
  MISC_FEATURE (417)..(417): Xaa can be any naturally occurring amino acid except Pro or Gly
  MISC_FEATURE (418)..(418): Xaa can be any naturally occurring amino acid except Pro or Gly
  MISC_FEATURE (420)..(420): Xaa can be any naturally occurring amino acid
  MISC_FEATURE (421)..(421): Xaa can be any naturally occurring amino acid
  MISC_FEATURE (422)..(422): Xaa can be any naturally occurring amino acid
  MISC_FEATURE (424)..(424): Xaa can be any naturally occurring amino acid except Pro or Gly
  MISC_FEATURE (425)..(425): Xaa can be any naturally occurring amino acid except Pro or Gly
  MISC_FEATURE (427)..(427): Xaa can be any naturally occurring amino acid
  MISC_FEATURE (428)..(428): Xaa can be any naturally occurring amino acid
  MISC_FEATURE (429)..(429): Xaa can be any naturally occurring amino acid
  MISC_FEATURE (431)..(431): Xaa can be any naturally occurring amino acid except Pro or Gly
  MISC_FEATURE (432)..(432): Xaa can be any naturally occurring amino acid except Pro or Gly
  MISC_FEATURE (434)..(434): Xaa can be any naturally occurring amino acid
  MISC_FEATURE (435)..(435): Xaa can be any naturally occurring amino acid
  MISC_FEATURE (436)..(436): Xaa can be any naturally occurring amino acid
  MISC_FEATURE (438)..(438): Xaa can be any naturally occurring amino acid except Pro or Gly
  MISC_FEATURE (439)..(439): Xaa can be any naturally occurring amino acid except Pro or Gly
  MISC_FEATURE (441)..(441): Xaa can be any naturally occurring amino acid
  MISC_FEATURE (442)..(442): Xaa can be any naturally occurring amino acid
  MISC_FEATURE (443)..(443): Xaa can be any naturally occurring amino acid
  MISC_FEATURE (445)..(445): Xaa can be any naturally occurring amino acid except Pro or Gly
  MISC_FEATURE (446)..(446): Xaa can be any naturally occurring amino acid except Pro or Gly
  MISC_FEATURE (448)..(448): Xaa can be any naturally occurring amino acid
  MISC_FEATURE (449)..(449): Xaa can be any naturally occurring amino acid
  MISC_FEATURE (450)..(450): Xaa can be any naturally occurring amino acid
  MISC_FEATURE (452)..(452): Xaa can be any naturally occurring amino acid except Pro or Gly
  MISC_FEATURE (453)..(453): Xaa can be any naturally occurring amino acid except Pro or Gly
  MISC_FEATURE (455)..(455): Xaa can be any naturally occurring amino acid
  MISC_FEATURE (456)..(456): Xaa can be any naturally occurring amino acid
  MISC_FEATURE (457)..(457): Xaa can be any naturally occurring amino acid
  MISC_FEATURE (459)..(459): Xaa can be any naturally occurring amino acid except Pro or Gly
  MISC_FEATURE (460)..(460): Xaa can be any naturally occurring amino acid except Pro or Gly
  MISC_FEATURE (462)..(462): Xaa can be any naturally occurring amino acid
  MISC_FEATURE (463)..(463): Xaa can be any naturally occurring amino acid
  MISC_FEATURE (464)..(464): Xaa can be any naturally occurring amino acid
  MISC_FEATURE (466)..(466): Xaa can be any naturally occurring amino acid except Pro or Gly
  MISC_FEATURE (467)..(467): Xaa can be any naturally occurring amino acid except Pro or Gly
  MISC_FEATURE (469)..(469): Xaa can be any naturally occurring amino acid
  MISC_FEATURE (470)..(470): Xaa can be any naturally occurring amino acid
  MISC_FEATURE (471)..(471): Xaa can be any naturally occurring amino acid
  MISC_FEATURE (473)..(473): Xaa can be any naturally occurring amino acid except Pro or Gly
  MISC_FEATURE (474)..(474): Xaa can be any naturally occurring amino acid except Pro or Gly
  MISC_FEATURE (476)..(476): Xaa can be any naturally occurring amino acid
  MISC_FEATURE (477)..(477): Xaa can be any naturally occurring amino acid
  MISC_FEATURE (478)..(478): Xaa can be any naturally occurring amino acid
  MISC_FEATURE (480)..(480): Xaa can be any naturally occurring amino acid except Pro or Gly
  MISC_FEATURE (481)..(481): Xaa can be any naturally occurring amino acid except Pro or Gly
  MISC_FEATURE (483)..(483): Xaa can be any naturally occurring amino acid
  MISC_FEATURE (484)..(484): Xaa can be any naturally occurring amino acid
  MISC_FEATURE (485)..(485): Xaa can be any naturally occurring amino acid
  MISC_FEATURE (487)..(487): Xaa can be any naturally occurring amino acid except Pro or Gly
  MISC_FEATURE (488)..(488): Xaa can be any naturally occurring amino acid except Pro or Gly
  MISC_FEATURE (490)..(490): Xaa can be any naturally occurring amino acid
  MISC_FEATURE (491)..(491): Xaa can be any naturally occurring amino acid
  MISC_FEATURE (492)..(492): Xaa can be any naturally occurring amino acid
  MISC_FEATURE (494)..(494): Xaa can be any naturally occurring amino acid except Pro or Gly
  MISC_FEATURE (495)..(495): Xaa can be any naturally occurring amino acid except Pro or Gly
  MISC_FEATURE (497)..(497): Xaa can be any naturally occurring amino acid
  MISC_FEATURE (498)..(498): Xaa can be any naturally occurring amino acid
  MISC_FEATURE (499)..(499): Xaa can be any naturally occurring amino acid
  MISC_FEATURE (501)..(501): Xaa can be any naturally occurring amino acid except Pro or Gly
  MISC_FEATURE (502)..(502): Xaa can be any naturally occurring amino acid except Pro or Gly
  MISC_FEATURE (504)..(504): Xaa can be any naturally occurring amino acid
  MISC_FEATURE (505)..(505): Xaa can be any naturally occurring amino acid
  MISC_FEATURE (506)..(506): Xaa can be any naturally occurring amino acid
  MISC_FEATURE (508)..(508): Xaa can be any naturally occurring amino acid except Pro or Gly
  MISC_FEATURE (509)..(509): Xaa can be any naturally occurring amino acid except Pro or Gly
  MISC_FEATURE (511)..(511): Xaa can be any naturally occurring amino acid
  MISC_FEATURE (512)..(512): Xaa can be any naturally occurring amino acid
  MISC_FEATURE (513)..(513): Xaa can be any naturally occurring amino acid
  MISC_FEATURE (515)..(515): Xaa can be any naturally occurring amino acid except Pro or Gly
  MISC_FEATURE (516)..(516): Xaa can be any naturally occurring amino acid except Pro or Gly
  MISC_FEATURE (518)..(518): Xaa can be any naturally occurring amino acid
  MISC_FEATURE (519)..(519): Xaa can be any naturally occurring amino acid
  MISC_FEATURE (520)..(520): Xaa can be any naturally occurring amino acid
  MISC_FEATURE (522)..(522): Xaa can be any naturally occurring amino acid except Pro or Gly
  MISC_FEATURE (523)..(523): Xaa can be any naturally occurring amino acid except Pro or Gly
  MISC_FEATURE (525)..(525): Xaa can be any naturally occurring amino acid
  MISC_FEATURE (526)..(526): Xaa can be any naturally occurring amino acid
  MISC_FEATURE (527)..(527): Xaa can be any naturally occurring amino acid
  MISC_FEATURE (529)..(529): Xaa can be any naturally occurring amino acid except Pro or Gly
  MISC_FEATURE (530)..(530): Xaa can be any naturally occurring amino acid except Pro or Gly
  MISC_FEATURE (532)..(532): Xaa can be any naturally occurring amino acid
  MISC_FEATURE (533)..(533): Xaa can be any naturally occurring amino acid
  MISC_FEATURE (534)..(534): Xaa can be any naturally occurring amino acid
  MISC_FEATURE (536)..(536): Xaa can be any naturally occurring amino acid except Pro or Gly
  MISC_FEATURE (537)..(537): Xaa can be any naturally occurring amino acid except Pro or Gly
  MISC_FEATURE (539)..(539): Xaa can be any naturally occurring amino acid
  MISC_FEATURE (540)..(540): Xaa can be any naturally occurring amino acid
  MISC_FEATURE (541)..(541): Xaa can be any naturally occurring amino acid
  MISC_FEATURE (543)..(543): Xaa can be any naturally occurring amino acid except Pro or Gly
  MISC_FEATURE (544)..(544): Xaa can be any naturally occurring amino acid except Pro or Gly
  MISC_FEATURE (546)..(546): Xaa can be any naturally occurring amino acid
  MISC_FEATURE (547)..(547): Xaa can be any naturally occurring amino acid
  MISC_FEATURE (548)..(548): Xaa can be any naturally occurring amino acid
  MISC_FEATURE (550)..(550): Xaa can be any naturally occurring amino acid except Pro or Gly
  MISC_FEATURE (551)..(551): Xaa can be any naturally occurring amino acid except Pro or Gly
  MISC_FEATURE (553)..(553): Xaa can be any naturally occurring amino acid
  MISC_FEATURE (554)..(554): Xaa can be any naturally occurring amino acid
  MISC_FEATURE (555)..(555): Xaa can be any naturally occurring amino acid
  MISC_FEATURE (557)..(557): Xaa can be any naturally occurring amino acid except Pro or Gly
  MISC_FEATURE (558)..(558): Xaa can be any naturally occurring amino acid except Pro or Gly
  MISC_FEATURE (560)..(560): Xaa can be any naturally occurring amino acid
  MISC_FEATURE (561)..(561): Xaa can be any naturally occurring amino acid
  MISC_FEATURE (562)..(562): Xaa can be any naturally occurring amino acid
  MISC_FEATURE (564)..(564): Xaa can be any naturally occurring amino acid except Pro or Gly
  MISC_FEATURE (565)..(565): Xaa can be any naturally occurring amino acid except Pro or Gly
  MISC_FEATURE (567)..(567): Xaa can be any naturally occurring amino acid
  MISC_FEATURE (568)..(568): Xaa can be any naturally occurring amino acid
  MISC_FEATURE (569)..(569): Xaa can be any naturally occurring amino acid
  MISC_FEATURE (571)..(571): Xaa can be any naturally occurring amino acid except Pro or Gly
  MISC_FEATURE (572)..(572): Xaa can be any naturally occurring amino acid except Pro or Gly
  MISC_FEATURE (574)..(574): Xaa can be any naturally occurring amino acid
  MISC_FEATURE (575)..(575): Xaa can be any naturally occurring amino acid
  MISC_FEATURE (576)..(576): Xaa can be any naturally occurring amino acid
  MISC_FEATURE (578)..(578): Xaa can be any naturally occurring amino acid except Pro or Gly
  MISC_FEATURE (579)..(579): Xaa can be any naturally occurring amino acid except Pro or Gly
  MISC_FEATURE (581)..(581): Xaa can be any naturally occurring amino acid
  MISC_FEATURE (582)..(582): Xaa can be any naturally occurring amino acid
  MISC_FEATURE (583)..(583): Xaa can be any naturally occurring amino acid
  MISC_FEATURE (585)..(585): Xaa can be any naturally occurring amino acid except Pro or Gly
  MISC_FEATURE (586)..(586): Xaa can be any naturally occurring amino acid except Pro or Gly
  MISC_FEATURE (588)..(588): Xaa can be any naturally occurring amino acid
  MISC_FEATURE (589)..(589): Xaa can be any naturally occurring amino acid
  MISC_FEATURE (590)..(590): Xaa can be any naturally occurring amino acid
  MISC_FEATURE (592)..(592): Xaa can be any naturally occurring amino acid except Pro or Gly
  MISC_FEATURE (593)..(593): Xaa can be any naturally occurring amino acid except Pro or Gly
  MISC_FEATURE (595)..(595): Xaa can be any naturally occurring amino acid
  MISC_FEATURE (596)..(596): Xaa can be any naturally occurring amino acid
  MISC_FEATURE (597)..(597): Xaa can be any naturally occurring amino acid
  MISC_FEATURE (599)..(599): Xaa can be any naturally occurring amino acid except Pro or Gly
  MISC_FEATURE (600)..(600): Xaa can be any naturally occurring amino acid except Pro or Gly
  MISC_FEATURE (602)..(602): Xaa can be any naturally occurring amino acid
  MISC_FEATURE (603)..(603): Xaa can be any naturally occurring amino acid
  MISC_FEATURE (604)..(604): Xaa can be any naturally occurring amino acid
  MISC_FEATURE (606)..(606): Xaa can be any naturally occurring amino acid except Pro or Gly
  MISC_FEATURE (607)..(607): Xaa can be any naturally occurring amino acid except Pro or Gly
  MISC_FEATURE (609)..(609): Xaa can be any naturally occurring amino acid
  MISC_FEATURE (610)..(610): Xaa can be any naturally occurring amino acid
  MISC_FEATURE (611)..(611): Xaa can be any naturally occurring amino acid
  MISC_FEATURE (613)..(613): Xaa can be any naturally occurring amino acid except Pro or Gly
  MISC_FEATURE (614)..(614): Xaa can be any naturally occurring amino acid except Pro or Gly
  MISC_FEATURE (616)..(616): Xaa can be any naturally occurring amino acid
  MISC_FEATURE (617)..(617): Xaa can be any naturally occurring amino acid
  MISC_FEATURE (618)..(618): Xaa can be any naturally occurring amino acid
  MISC_FEATURE (620)..(620): Xaa can be any naturally occurring amino acid except Pro or Gly
  MISC_FEATURE (621)..(621): Xaa can be any naturally occurring amino acid except Pro or Gly
  MISC_FEATURE (623)..(623): Xaa can be any naturally occurring amino acid
  MISC_FEATURE (624)..(624): Xaa can be any naturally occurring amino acid
  MISC_FEATURE (625)..(625): Xaa can be any naturally occurring amino acid
  MISC_FEATURE (627)..(627): Xaa can be any naturally occurring amino acid except Pro or Gly
  MISC_FEATURE (628)..(628): Xaa can be any naturally occurring amino acid except Pro or Gly
  MISC_FEATURE (630)..(630): Xaa can be any naturally occurring amino acid
  MISC_FEATURE (631)..(631): Xaa can be any naturally occurring amino acid
  MISC_FEATURE (632)..(632): Xaa can be any naturally occurring amino acid
  MISC_FEATURE (634)..(634): Xaa can be any naturally occurring amino acid except Pro or Gly
  MISC_FEATURE (635)..(635): Xaa can be any naturally occurring amino acid except Pro or Gly
  MISC_FEATURE (637)..(637): Xaa can be any naturally occurring amino acid
  MISC_FEATURE (638)..(638): Xaa can be any naturally occurring amino acid
  MISC_FEATURE (639)..(639): Xaa can be any naturally occurring amino acid
  MISC_FEATURE (641)..(641): Xaa can be any naturally occurring amino acid except Pro or Gly
  MISC_FEATURE (642)..(642): Xaa can be any naturally occurring amino acid except Pro or Gly
  MISC_FEATURE (644)..(644): Xaa can be any naturally occurring amino acid
  MISC_FEATURE (645)..(645): Xaa can be any naturally occurring amino acid
  MISC_FEATURE (646)..(646): Xaa can be any naturally occurring amino acid
  MISC_FEATURE (648)..(648): Xaa can be any naturally occurring amino acid except Pro or Gly
  MISC_FEATURE (649)..(649): Xaa can be any naturally occurring amino acid except Pro or Gly
  MISC_FEATURE (651)..(651): Xaa can be any naturally occurring amino acid
  MISC_FEATURE (652)..(652): Xaa can be any naturally occurring amino acid
  MISC_FEATURE (653)..(653): Xaa can be any naturally occurring amino acid
  MISC_FEATURE (655)..(655): Xaa can be any naturally occurring amino acid except Pro or Gly
  MISC_FEATURE (656)..(656): Xaa can be any naturally occurring amino acid except Pro or Gly
  MISC_FEATURE (658)..(658): Xaa can be any naturally occurring amino acid
  MISC_FEATURE (659)..(659): Xaa can be any naturally occurring amino acid
  MISC_FEATURE (660)..(660): Xaa can be any naturally occurring amino acid
  MISC_FEATURE (662)..(662): Xaa can be any naturally occurring amino acid except Pro or Gly
  MISC_FEATURE (663)..(663): Xaa can be any naturally occurring amino acid except Pro or Gly
  MISC_FEATURE (665)..(665): Xaa can be any naturally occurring amino acid
  MISC_FEATURE (666)..(666): Xaa can be any naturally occurring amino acid
  MISC_FEATURE (667)..(667): Xaa can be any naturally occurring amino acid
  MISC_FEATURE (669)..(669): Xaa can be any naturally occurring amino acid except Pro or Gly
  MISC_FEATURE (670)..(670): Xaa can be any naturally occurring amino acid except Pro or Gly
  MISC_FEATURE (672)..(672): Xaa can be any naturally occurring amino acid
  MISC_FEATURE (673)..(673): Xaa can be any naturally occurring amino acid
  MISC_FEATURE (674)..(674): Xaa can be any naturally occurring amino acid
  MISC_FEATURE (676)..(676): Xaa can be any naturally occurring amino acid except Pro or Gly
  MISC_FEATURE (677)..(677): Xaa can be any naturally occurring amino acid except Pro or Gly
  MISC_FEATURE (679)..(679): Xaa can be any naturally occurring amino acid
  MISC_FEATURE (680)..(680): Xaa can be any naturally occurring amino acid
  MISC_FEATURE (681)..(681): Xaa can be any naturally occurring amino acid
  MISC_FEATURE (683)..(683): Xaa can be any naturally occurring amino acid except Pro or Gly
  MISC_FEATURE (684)..(684): Xaa can be any naturally occurring amino acid except Pro or Gly
  MISC_FEATURE (686)..(686): Xaa can be any naturally occurring amino acid
  MISC_FEATURE (687)..(687): Xaa can be any naturally occurring amino acid
  MISC_FEATURE (688)..(688): Xaa can be any naturally occurring amino acid
  MISC_FEATURE (690)..(690): Xaa can be any naturally occurring amino acid except Pro or Gly
  MISC_FEATURE (691)..(691): Xaa can be any naturally occurring amino acid except Pro or Gly
  MISC_FEATURE (693)..(693): Xaa can be any naturally occurring amino acid
  MISC_FEATURE (694)..(694): Xaa can be any naturally occurring amino acid
  MISC_FEATURE (695)..(695): Xaa can be any naturally occurring amino acid
  MISC_FEATURE (697)..(697): Xaa can be any naturally occurring amino acid except Pro or Gly
  MISC_FEATURE (698)..(698): Xaa can be any naturally occurring amino acid except Pro or Gly
  MISC_FEATURE (700)..(700): Xaa can be any naturally occurring amino acid
  MISC_FEATURE (701)..(701): Xaa can be any naturally occurring amino acid
  MISC_FEATURE (702)..(702): Xaa can be any naturally occurring amino acid
  MISC_FEATURE (704)..(704): Xaa can be any naturally occurring amino acid except Pro or Gly
  MISC_FEATURE (705)..(705): Xaa can be any naturally occurring amino acid except Pro or Gly
  MISC_FEATURE (707)..(707): Xaa can be any naturally occurring amino acid
  MISC_FEATURE (708)..(708): Xaa can be any naturally occurring amino acid
  MISC_FEATURE (709)..(709): Xaa can be any naturally occurring amino acid
  MISC_FEATURE (711)..(711): Xaa can be any naturally occurring amino acid except Pro or Gly
  MISC_FEATURE (712)..(712): Xaa can be any naturally occurring amino acid except Pro or Gly
  MISC_FEATURE (714)..(714): Xaa can be any naturally occurring amino acid
  MISC_FEATURE (715)..(715): Xaa can be any naturally occurring amino acid
  MISC_FEATURE (716)..(716): Xaa can be any naturally occurring amino acid
  MISC_FEATURE (718)..(718): Xaa can be any naturally occurring amino acid except Pro or Gly
  MISC_FEATURE (719)..(719): Xaa can be any naturally occurring amino acid except Pro or Gly
  MISC_FEATURE (721)..(721): Xaa can be any naturally occurring amino acid
  MISC_FEATURE (722)..(722): Xaa can be any naturally occurring amino acid
  MISC_FEATURE (723)..(723): Xaa can be any naturally occurring amino acid
  MISC_FEATURE (725)..(725): Xaa can be any naturally occurring amino acid except Pro or Gly
  MISC_FEATURE (726)..(726): Xaa can be any naturally occurring amino acid except Pro or Gly
  MISC_FEATURE (728)..(728): Xaa can be any naturally occurring amino acid
  MISC_FEATURE (729)..(729): Xaa can be any naturally occurring amino acid
  MISC_FEATURE (730)..(730): Xaa can be any naturally occurring amino acid
  MISC_FEATURE (732)..(732): Xaa can be any naturally occurring amino acid except Pro or Gly
  MISC_FEATURE (733)..(733): Xaa can be any naturally occurring amino acid except Pro or Gly
  MISC_FEATURE (735)..(735): Xaa can be any naturally occurring amino acid
  MISC_FEATURE (736)..(736): Xaa can be any naturally occurring amino acid
  MISC_FEATURE (737)..(737): Xaa can be any naturally occurring amino acid
  MISC_FEATURE (739)..(739): Xaa can be any naturally occurring amino acid except Pro or Gly
  MISC_FEATURE (740)..(740): Xaa can be any naturally occurring amino acid except Pro or Gly
  MISC_FEATURE (742)..(742): Xaa can be any naturally occurring amino acid
  MISC_FEATURE (743)..(743): Xaa can be any naturally occurring amino acid
  MISC_FEATURE (744)..(744): Xaa can be any naturally occurring amino acid
  MISC_FEATURE (746)..(746): Xaa can be any naturally occurring amino acid except Pro or Gly
  MISC_FEATURE (747)..(747): Xaa can be any naturally occurring amino acid except Pro or Gly
  MISC_FEATURE (749)..(749): Xaa can be any naturally occurring amino acid
  MISC_FEATURE (750)..(750): Xaa can be any naturally occurring amino acid
  MISC_FEATURE (751)..(751): Xaa can be any naturally occurring amino acid
  MISC_FEATURE (753)..(753): Xaa can be any naturally occurring amino acid except Pro or Gly
  MISC_FEATURE (754)..(754): Xaa can be any naturally occurring amino acid except Pro or Gly
  MISC_FEATURE (756)..(756): Xaa can be any naturally occurring amino acid
  MISC_FEATURE (757)..(757): Xaa can be any naturally occurring amino acid
  MISC_FEATURE (758)..(758): Xaa can be any naturally occurring amino acid
  MISC_FEATURE (760)..(760): Xaa can be any naturally occurring amino acid except Pro or Gly
  MISC_FEATURE (761)..(761): Xaa can be any naturally occurring amino acid except Pro or Gly
  MISC_FEATURE (763)..(763): Xaa can be any naturally occurring amino acid
  MISC_FEATURE (764)..(764): Xaa can be any naturally occurring amino acid
  MISC_FEATURE (765)..(765): Xaa can be any naturally occurring amino acid
  MISC_FEATURE (767)..(767): Xaa can be any naturally occurring amino acid except Pro or Gly
  MISC_FEATURE (768)..(768): Xaa can be any naturally occurring amino acid except Pro or Gly
  MISC_FEATURE (770)..(770): Xaa can be any naturally occurring amino acid
  MISC_FEATURE (771)..(771): Xaa can be any naturally occurring amino acid
  MISC_FEATURE (772)..(772): Xaa can be any naturally occurring amino acid
  MISC_FEATURE (774)..(774): Xaa can be any naturally occurring amino acid except Pro or Gly
  MISC_FEATURE (775)..(775): Xaa can be any naturally occurring amino acid except Pro or Gly
  MISC_FEATURE (777)..(777): Xaa can be any naturally occurring amino acid
  MISC_FEATURE (778)..(778): Xaa can be any naturally occurring amino acid
  MISC_FEATURE (779)..(779): Xaa can be any naturally occurring amino acid
  MISC_FEATURE (781)..(781): Xaa can be any naturally occurring amino acid except Pro or Gly
  MISC_FEATURE (782)..(782): Xaa can be any naturally occurring amino acid except Pro or Gly
  MISC_FEATURE (784)..(784): Xaa can be any naturally occurring amino acid
  MISC_FEATURE (785)..(785): Xaa can be any naturally occurring amino acid
  MISC_FEATURE (786)..(786): Xaa can be any naturally occurring amino acid
  MISC_FEATURE (788)..(788): Xaa can be any naturally occurring amino acid except Pro or Gly
  MISC_FEATURE (789)..(789): Xaa can be any naturally occurring amino acid except Pro or Gly
  MISC_FEATURE (791)..(791): Xaa can be any naturally occurring amino acid
  MISC_FEATURE (792)..(792): Xaa can be any naturally occurring amino acid
  MISC_FEATURE (793)..(793): Xaa can be any naturally occurring amino acid
  MISC_FEATURE (795)..(795): Xaa can be any naturally occurring amino acid except Pro or Gly
  MISC_FEATURE (796)..(796): Xaa can be any naturally occurring amino acid except Pro or Gly
  MISC_FEATURE (798)..(798): Xaa can be any naturally occurring amino acid
  MISC_FEATURE (799)..(799): Xaa can be any naturally occurring amino acid
  MISC_FEATURE (800)..(800): Xaa can be any naturally occurring amino acid
  MISC_FEATURE (802)..(802): Xaa can be any naturally occurring amino acid except Pro or Gly
  MISC_FEATURE (803)..(803): Xaa can be any naturally occurring amino acid except Pro or Gly
  MISC_FEATURE (805)..(805): Xaa can be any naturally occurring amino acid
  MISC_FEATURE (806)..(806): Xaa can be any naturally occurring amino acid
  MISC_FEATURE (807)..(807): Xaa can be any naturally occurring amino acid
  MISC_FEATURE (809)..(809): Xaa can be any naturally occurring amino acid except Pro or Gly
  MISC_FEATURE (810)..(810): Xaa can be any naturally occurring amino acid except Pro or Gly
  MISC_FEATURE (812)..(812): Xaa can be any naturally occurring amino acid
  MISC_FEATURE (813)..(813): Xaa can be any naturally occurring amino acid
  MISC_FEATURE (814)..(814): Xaa can be any naturally occurring amino acid
  MISC_FEATURE (816)..(816): Xaa can be any naturally occurring amino acid except Pro or Gly
  MISC_FEATURE (817)..(817): Xaa can be any naturally occurring amino acid except Pro or Gly
  MISC_FEATURE (819)..(819): Xaa can be any naturally occurring amino acid
  MISC_FEATURE (820)..(820): Xaa can be any naturally occurring amino acid
  MISC_FEATURE (821)..(821): Xaa can be any naturally occurring amino acid
  MISC_FEATURE (823)..(823): Xaa can be any naturally occurring amino acid except Pro or Gly
  MISC_FEATURE (824)..(824): Xaa can be any naturally occurring amino acid except Pro or Gly
  MISC_FEATURE (826)..(826): Xaa can be any naturally occurring amino acid
  MISC_FEATURE (827)..(827): Xaa can be any naturally occurring amino acid
  MISC_FEATURE (828)..(828): Xaa can be any naturally occurring amino acid
  MISC_FEATURE (830)..(830): Xaa can be any naturally occurring amino acid except Pro or Gly
  MISC_FEATURE (831)..(831): Xaa can be any naturally occurring amino acid except Pro or Gly
  MISC_FEATURE (833)..(833): Xaa can be any naturally occurring amino acid
  MISC_FEATURE (834)..(834): Xaa can be any naturally occurring amino acid
  MISC_FEATURE (835)..(835): Xaa can be any naturally occurring amino acid
  MISC_FEATURE (837)..(837): Xaa can be any naturally occurring amino acid except Pro or Gly
  MISC_FEATURE (838)..(838): Xaa can be any naturally occurring amino acid except Pro or Gly
  MISC_FEATURE (840)..(840): Xaa can be any naturally occurring amino acid
  MISC_FEATURE (841)..(841): Xaa can be any naturally occurring amino acid
  MISC_FEATURE (842)..(842): Xaa can be any naturally occurring amino acid
  MISC_FEATURE (844)..(844): Xaa can be any naturally occurring amino acid except Pro or Gly
  MISC_FEATURE (845)..(845): Xaa can be any naturally occurring amino acid except Pro or Gly
  MISC_FEATURE (847)..(847): Xaa can be any naturally occurring amino acid
  MISC_FEATURE (848)..(848): Xaa can be any naturally occurring amino acid
  MISC_FEATURE (849)..(849): Xaa can be any naturally occurring amino acid
  MISC_FEATURE (851)..(851): Xaa can be any naturally occurring amino acid except Pro or Gly
  MISC_FEATURE (852)..(852): Xaa can be any naturally occurring amino acid except Pro or Gly
  MISC_FEATURE (854)..(854): Xaa can be any naturally occurring amino acid
  MISC_FEATURE (855)..(855): Xaa can be any naturally occurring amino acid
  MISC_FEATURE (856)..(856): Xaa can be any naturally occurring amino acid
  MISC_FEATURE (858)..(858): Xaa can be any naturally occurring amino acid except Pro or Gly
  MISC_FEATURE (859)..(859): Xaa can be any naturally occurring amino acid except Pro or Gly
  MISC_FEATURE (861)..(861): Xaa can be any naturally occurring amino acid
  MISC_FEATURE (862)..(862): Xaa can be any naturally occurring amino acid
  MISC_FEATURE (863)..(863): Xaa can be any naturally occurring amino acid
  MISC_FEATURE (865)..(865): Xaa can be any naturally occurring amino acid except Pro or Gly
  MISC_FEATURE (866)..(866): Xaa can be any naturally occurring amino acid except Pro or Gly
  MISC_FEATURE (868)..(868): Xaa can be any naturally occurring amino acid
  MISC_FEATURE (869)..(869): Xaa can be any naturally occurring amino acid
  MISC_FEATURE (870)..(870): Xaa can be any naturally occurring amino acid
  MISC_FEATURE (872)..(872): Xaa can be any naturally occurring amino acid except Pro or Gly
  MISC_FEATURE (873)..(873): Xaa can be any naturally occurring amino acid except Pro or Gly
  MISC_FEATURE (875)..(875): Xaa can be any naturally occurring amino acid
  MISC_FEATURE (876)..(876): Xaa can be any naturally occurring amino acid
  MISC_FEATURE (877)..(877): Xaa can be any naturally occurring amino acid
  MISC_FEATURE (879)..(879): Xaa can be any naturally occurring amino acid except Pro or Gly
  MISC_FEATURE (880)..(880): Xaa can be any naturally occurring amino acid except Pro or Gly
  MISC_FEATURE (882)..(882): Xaa can be any naturally occurring amino acid
  MISC_FEATURE (883)..(883): Xaa can be any naturally occurring amino acid
  MISC_FEATURE (884)..(884): Xaa can be any naturally occurring amino acid
  MISC_FEATURE (886)..(886): Xaa can be any naturally occurring amino acid except Pro or Gly
  MISC_FEATURE (887)..(887): Xaa can be any naturally occurring amino acid except Pro or Gly
  MISC_FEATURE (889)..(889): Xaa can be any naturally occurring amino acid
  MISC_FEATURE (890)..(890): Xaa can be any naturally occurring amino acid
  MISC_FEATURE (891)..(891): Xaa can be any naturally occurring amino acid
  MISC_FEATURE (893)..(893): Xaa can be any naturally occurring amino acid except Pro or Gly
  MISC_FEATURE (894)..(894): Xaa can be any naturally occurring amino acid except Pro or Gly
  MISC_FEATURE (896)..(896): Xaa can be any naturally occurring amino acid
  MISC_FEATURE (897)..(897): Xaa can be any naturally occurring amino acid
  MISC_FEATURE (898)..(898): Xaa can be any naturally occurring amino acid
  MISC_FEATURE (900)..(900): Xaa can be any naturally occurring amino acid except Pro or Gly
  MISC_FEATURE (901)..(901): Xaa can be any naturally occurring amino acid except Pro or Gly
  MISC_FEATURE (903)..(903): Xaa can be any naturally occurring amino acid
  MISC_FEATURE (904)..(904): Xaa can be any naturally occurring amino acid
  MISC_FEATURE (905)..(905): Xaa can be any naturally occurring amino acid
  MISC_FEATURE (907)..(907): Xaa can be any naturally occurring amino acid except Pro or Gly
  MISC_FEATURE (908)..(908): Xaa can be any naturally occurring amino acid except Pro or Gly
  MISC_FEATURE (910)..(910): Xaa can be any naturally occurring amino acid
  MISC_FEATURE (911)..(911): Xaa can be any naturally occurring amino acid
  MISC_FEATURE (912)..(912): Xaa can be any naturally occurring amino acid
  MISC_FEATURE (914)..(914): Xaa can be any naturally occurring amino acid except Pro or Gly
  MISC_FEATURE (915)..(915): Xaa can be any naturally occurring amino acid except Pro or Gly
  MISC_FEATURE (917)..(917): Xaa can be any naturally occurring amino acid
  MISC_FEATURE (918)..(918): Xaa can be any naturally occurring amino acid
  MISC_FEATURE (919)..(919): Xaa can be any naturally occurring amino acid
  MISC_FEATURE (921)..(921): Xaa can be any naturally occurring amino acid except Pro or Gly
  MISC_FEATURE (922)..(922): Xaa can be any naturally occurring amino acid except Pro or Gly
  MISC_FEATURE (924)..(924): Xaa can be any naturally occurring amino acid
  MISC_FEATURE (925)..(925): Xaa can be any naturally occurring amino acid
  MISC_FEATURE (926)..(926): Xaa can be any naturally occurring amino acid
  MISC_FEATURE (928)..(928): Xaa can be any naturally occurring amino acid except Pro or Gly
  MISC_FEATURE (929)..(929): Xaa can be any naturally occurring amino acid except Pro or Gly
  MISC_FEATURE (931)..(931): Xaa can be any naturally occurring amino acid
  MISC_FEATURE (932)..(932): Xaa can be any naturally occurring amino acid
  MISC_FEATURE (933)..(933): Xaa can be any naturally occurring amino acid
  MISC_FEATURE (935)..(935): Xaa can be any naturally occurring amino acid except Pro or Gly
  MISC_FEATURE (936)..(936): Xaa can be any naturally occurring amino acid except Pro or Gly
  MISC_FEATURE (938)..(938): Xaa can be any naturally occurring amino acid
  MISC_FEATURE (939)..(939): Xaa can be any naturally occurring amino acid
  MISC_FEATURE (940)..(940): Xaa can be any naturally occurring amino acid
  MISC_FEATURE (942)..(942): Xaa can be any naturally occurring amino acid except Pro or Gly
  MISC_FEATURE (943)..(943): Xaa can be any naturally occurring amino acid except Pro or Gly
  MISC_FEATURE (945)..(945): Xaa can be any naturally occurring amino acid
  MISC_FEATURE (946)..(946): Xaa can be any naturally occurring amino acid
  MISC_FEATURE (947)..(947): Xaa can be any naturally occurring amino acid
  MISC_FEATURE (949)..(949): Xaa can be any naturally occurring amino acid except Pro or Gly
  MISC_FEATURE (950)..(950): Xaa can be any naturally occurring amino acid except Pro or Gly
  MISC_FEATURE (952)..(952): Xaa can be any naturally occurring amino acid
  MISC_FEATURE (953)..(953): Xaa can be any naturally occurring amino acid
  MISC_FEATURE (954)..(954): Xaa can be any naturally occurring amino acid
  MISC_FEATURE (956)..(956): Xaa can be any naturally occurring amino acid except Pro or Gly
  MISC_FEATURE (957)..(957): Xaa can be any naturally occurring amino acid except Pro or Gly
  MISC_FEATURE (959)..(959): Xaa can be any naturally occurring amino acid
  MISC_FEATURE (960)..(960): Xaa can be any naturally occurring amino acid
  MISC_FEATURE (961)..(961): Xaa can be any naturally occurring amino acid
  MISC_FEATURE (963)..(963): Xaa can be any naturally occurring amino acid except Pro or Gly
  MISC_FEATURE (964)..(964): Xaa can be any naturally occurring amino acid except Pro or Gly
  MISC_FEATURE (966)..(966): Xaa can be any naturally occurring amino acid
  MISC_FEATURE (967)..(967): Xaa can be any naturally occurring amino acid
  MISC_FEATURE (968)..(968): Xaa can be any naturally occurring amino acid
  MISC_FEATURE (970)..(970): Xaa can be any naturally occurring amino acid except Pro or Gly
  MISC_FEATURE (971)..(971): Xaa can be any naturally occurring amino acid except Pro or Gly
  MISC_FEATURE (973)..(973): Xaa can be any naturally occurring amino acid
  MISC_FEATURE (974)..(974): Xaa can be any naturally occurring amino acid
  MISC_FEATURE (975)..(975): Xaa can be any naturally occurring amino acid
  MISC_FEATURE (977)..(977): Xaa can be any naturally occurring amino acid except Pro or Gly
  MISC_FEATURE (978)..(978): Xaa can be any naturally occurring amino acid except Pro or Gly
  MISC_FEATURE (980)..(980): Xaa can be any naturally occurring amino acid
  MISC_FEATURE (981)..(981): Xaa can be any naturally occurring amino acid
  MISC_FEATURE (982)..(982): Xaa can be any naturally occurring amino acid
  MISC_FEATURE (984)..(984): Xaa can be any naturally occurring amino acid except Pro or Gly
  MISC_FEATURE (985)..(985): Xaa can be any naturally occurring amino acid except Pro or Gly
  MISC_FEATURE (987)..(987): Xaa can be any naturally occurring amino acid
  MISC_FEATURE (988)..(988): Xaa can be any naturally occurring amino acid
  MISC_FEATURE (989)..(989): Xaa can be any naturally occurring amino acid
  MISC_FEATURE (991)..(991): Xaa can be any naturally occurring amino acid except Pro or Gly
  MISC_FEATURE (992)..(992): Xaa can be any naturally occurring amino acid except Pro or Gly
  MISC_FEATURE (994)..(994): Xaa can be any naturally occurring amino acid
  MISC_FEATURE (995)..(995): Xaa can be any naturally occurring amino acid
  MISC_FEATURE (996)..(996): Xaa can be any naturally occurring amino acid
  MISC_FEATURE (998)..(998): Xaa can be any naturally occurring amino acid except Pro or Gly
  MISC_FEATURE (999)..(999): Xaa can be any naturally occurring amino acid except Pro or Gly
  MISC_FEATURE (1001)..(1001): Xaa can be any naturally occurring amino acid
  MISC_FEATURE (1002)..(1002): Xaa can be any naturally occurring amino acid
  MISC_FEATURE (1003)..(1003): Xaa can be any naturally occurring amino acid
  MISC_FEATURE (1005)..(1005): Xaa can be any naturally occurring amino acid except Pro or Gly
  MISC_FEATURE (1006)..(1006): Xaa can be any naturally occurring amino acid except Pro or Gly
  MISC_FEATURE (1008)..(1008): Xaa can be any naturally occurring amino acid
  MISC_FEATURE (1009)..(1009): Xaa can be any naturally occurring amino acid
  MISC_FEATURE (1010)..(1010): Xaa can be any naturally occurring amino acid
  MISC_FEATURE (1012)..(1012): Xaa can be any naturally occurring amino acid except Pro or Gly
  MISC_FEATURE (1013)..(1013): Xaa can be any naturally occurring amino acid except Pro or Gly
  MISC_FEATURE (1015)..(1015): Xaa can be any naturally occurring amino acid
  MISC_FEATURE (1016)..(1016): Xaa can be any naturally occurring amino acid
  MISC_FEATURE (1017)..(1017): Xaa can be any naturally occurring amino acid
  MISC_FEATURE (1019)..(1019): Xaa can be any naturally occurring amino acid except Pro or Gly
  MISC_FEATURE (1020)..(1020): Xaa can be any naturally occurring amino acid except Pro or Gly
  MISC_FEATURE (1022)..(1022): Xaa can be any naturally occurring amino acid
  MISC_FEATURE (1023)..(1023): Xaa can be any naturally occurring amino acid
  MISC_FEATURE (1024)..(1024): Xaa can be any naturally occurring amino acid
  MISC_FEATURE (1026)..(1026): Xaa can be any naturally occurring amino acid except Pro or Gly
  MISC_FEATURE (1027)..(1027): Xaa can be any naturally occurring amino acid except Pro or Gly
  MISC_FEATURE (1029)..(1029): Xaa can be any naturally occurring amino acid
  MISC_FEATURE (1030)..(1030): Xaa can be any naturally occurring amino acid
  MISC_FEATURE (1031)..(1031): Xaa can be any naturally occurring amino acid
  MISC_FEATURE (1033)..(1033): Xaa can be any naturally occurring amino acid except Pro or Gly
  MISC_FEATURE (1034)..(1034): Xaa can be any naturally occurring amino acid except Pro or Gly
  MISC_FEATURE (1036)..(1036): Xaa can be any naturally occurring amino acid
  MISC_FEATURE (1037)..(1037): Xaa can be any naturally occurring amino acid
  MISC_FEATURE (1038)..(1038): Xaa can be any naturally occurring amino acid
  MISC_FEATURE (1040)..(1040): Xaa can be any naturally occurring amino acid except Pro or Gly
  MISC_FEATURE (1041)..(1041): Xaa can be any naturally occurring amino acid except Pro or Gly
  MISC_FEATURE (1043)..(1043): Xaa can be any naturally occurring amino acid
  MISC_FEATURE (1044)..(1044): Xaa can be any naturally occurring amino acid
  MISC_FEATURE (1045)..(1045): Xaa can be any naturally occurring amino acid
  MISC_FEATURE (1047)..(1047): Xaa can be any naturally occurring amino acid except Pro or Gly
  MISC_FEATURE (1048)..(1048): Xaa can be any naturally occurring amino acid except Pro or Gly
  MISC_FEATURE (1050)..(1050): Xaa can be any naturally occurring amino acid
  MISC_FEATURE (1051)..(1051): Xaa can be any naturally occurring amino acid
  MISC_FEATURE (1052)..(1052): Xaa can be any naturally occurring amino acid
  MISC_FEATURE (1054)..(1054): Xaa can be any naturally occurring amino acid except Pro or Gly
  MISC_FEATURE (1055)..(1055): Xaa can be any naturally occurring amino acid except Pro or Gly
  MISC_FEATURE (1057)..(1057): Xaa can be any naturally occurring amino acid
  MISC_FEATURE (1058)..(1058): Xaa can be any naturally occurring amino acid
  MISC_FEATURE (1059)..(1059): Xaa can be any naturally occurring amino acid
  MISC_FEATURE (1061)..(1061): Xaa can be any naturally occurring amino acid except Pro or Gly
  MISC_FEATURE (1062)..(1062): Xaa can be any naturally occurring amino acid except Pro or Gly
  MISC_FEATURE (1064)..(1064): Xaa can be any naturally occurring amino acid
  MISC_FEATURE (1065)..(1065): Xaa can be any naturally occurring amino acid
  MISC_FEATURE (1066)..(1066): Xaa can be any naturally occurring amino acid
  MISC_FEATURE (1068)..(1068): Xaa can be any naturally occurring amino acid except Pro or Gly
  MISC_FEATURE (1069)..(1069): Xaa can be any naturally occurring amino acid except Pro or Gly
  MISC_FEATURE (1071)..(1071): Xaa can be any naturally occurring amino acid
  MISC_FEATURE (1072)..(1072): Xaa can be any naturally occurring amino acid
  MISC_FEATURE (1073)..(1073): Xaa can be any naturally occurring amino acid
  MISC_FEATURE (1075)..(1075): Xaa can be any naturally occurring amino acid except Pro or Gly
  MISC_FEATURE (1076)..(1076): Xaa can be any naturally occurring amino acid except Pro or Gly
  MISC_FEATURE (1078)..(1078): Xaa can be any naturally occurring amino acid
  MISC_FEATURE (1079)..(1079): Xaa can be any naturally occurring amino acid
  MISC_FEATURE (1080)..(1080): Xaa can be any naturally occurring amino acid
  MISC_FEATURE (1082)..(1082): Xaa can be any naturally occurring amino acid except Pro or Gly
  MISC_FEATURE (1083)..(1083): Xaa can be any naturally occurring amino acid except Pro or Gly
  MISC_FEATURE (1085)..(1085): Xaa can be any naturally occurring amino acid
  MISC_FEATURE (1086)..(1086): Xaa can be any naturally occurring amino acid
  MISC_FEATURE (1087)..(1087): Xaa can be any naturally occurring amino acid
  MISC_FEATURE (1089)..(1089): Xaa can be any naturally occurring amino acid except Pro or Gly
  MISC_FEATURE (1090)..(1090): Xaa can be any naturally occurring amino acid except Pro or Gly
  MISC_FEATURE (1092)..(1092): Xaa can be any naturally occurring amino acid
  MISC_FEATURE (1093)..(1093): Xaa can be any naturally occurring amino acid
  MISC_FEATURE (1094)..(1094): Xaa can be any naturally occurring amino acid
  MISC_FEATURE (1096)..(1096): Xaa can be any naturally occurring amino acid except Pro or Gly
  MISC_FEATURE (1097)..(1097): Xaa can be any naturally occurring amino acid except Pro or Gly
  MISC_FEATURE (1099)..(1099): Xaa can be any naturally occurring amino acid
  MISC_FEATURE (1100)..(1100): Xaa can be any naturally occurring amino acid
  MISC_FEATURE (1101)..(1101): Xaa can be any naturally occurring amino acid
  MISC_FEATURE (1103)..(1103): Xaa can be any naturally occurring amino acid except Pro or Gly
  MISC_FEATURE (1104)..(1104): Xaa can be any naturally occurring amino acid except Pro or Gly
  MISC_FEATURE (1106)..(1106): Xaa can be any naturally occurring amino acid
  MISC_FEATURE (1107)..(1107): Xaa can be any naturally occurring amino acid
  MISC_FEATURE (1108)..(1108): Xaa can be any naturally occurring amino acid
  MISC_FEATURE (1110)..(1110): Xaa can be any naturally occurring amino acid except Pro or Gly
  MISC_FEATURE (1111)..(1111): Xaa can be any naturally occurring amino acid except Pro or Gly
  MISC_FEATURE (1113)..(1113): Xaa can be any naturally occurring amino acid
  MISC_FEATURE (1114)..(1114): Xaa can be any naturally occurring amino acid
  MISC_FEATURE (1115)..(1115): Xaa can be any naturally occurring amino acid
  MISC_FEATURE (1117)..(1117): Xaa can be any naturally occurring amino acid except Pro or Gly
  MISC_FEATURE (1118)..(1118): Xaa can be any naturally occurring amino acid except Pro or Gly
  MISC_FEATURE (1120)..(1120): Xaa can be any naturally occurring amino acid
XXPXXGXXXPXXGXXXPXXGXXXPXXGXXXPXXGXXXPXXGXXXPXXGXXXPXXGXXXPXXGXXXPXXGXXXPXXGXXXPXXGXXXPXXGXXXPXXGXXXPXXGXXXPXXGXXXPXXGXXXPXXGXXXPXXGXXXPXXGXXXPXXGXXXPXXGXXXPXXGXXXPXXGXXXPXXGXXXPXXGXXXPXXGXXXPXXGXXXPXXGXXXPXXGXXXPXXGXXXPXXGXXXPXXGXXXPXXGXXXPXXGXXXPXXGXXXPXXGXXXPXXGXXXPXXGXXXPXXGXXXPXXGXXXPXXGXXXPXXGXXXPXXGXXXPXXGXXXPXXGXXXPXXGXXXPXXGXXXPXXGXXXPXXGXXXPXXGXXXPXXGXXXPXXGXXXPXXGXXXPXXGXXXPXXGXXXPXXGXXXPXXGXXXPXXGXXXPXXGXXXPXXGXXXPXXGXXXPXXGXXXPXXGXXXPXXGXXXPXXGXXXPXXGXXXPXXGXXXPXXGXXXPXXGXXXPXXGXXXPXXGXXXPXXGXXXPXXGXXXPXXGXXXPXXGXXXPXXGXXXPXXGXXXPXXGXXXPXXGXXXPXXGXXXPXXGXXXPXXGXXXPXXGXXXPXXGXXXPXXGXXXPXXGXXXPXXGXXXPXXGXXXPXXGXXXPXXGXXXPXXGXXXPXXGXXXPXXGXXXPXXGXXXPXXGXXXPXXGXXXPXXGXXXPXXGXXXPXXGXXXPXXGXXXPXXGXXXPXXGXXXPXXGXXXPXXGXXXPXXGXXXPXXGXXXPXXGXXXPXXGXXXPXXGXXXPXXGXXXPXXGXXXPXXGXXXPXXGXXXPXXGXXXPXXGXXXPXXGXXXPXXGXXXPXXGXXXPXXGXXXPXXGXXXPXXGXXXPXXGXXXPXXGXXXPXXGXXXPXXGXXXPXXGXXXPXXGXXXPXXGXXXPXXGXXXPXXGXXXPXXGXXXPXXGXXXPXXGXXXPXXGXXXPXXGXXXPXXGXXXPXXGXXXPXXGXXXPXXGXXXPXXGXXXPXXGXXXPXXGXXXPXXGXXXPXXGXXXPXXGXXXPXXGXXXPXXGXXXPXXGXXXPXXGXXXPXXGXXXPXXGXXXPXXGXXXPXXGXXXPXXGXXXPXXGXXXPXXGXXXPXXGXXXPXXGXXXPXXGX

SEQ ID NO: 59 - protein, 1280 aa, Artificial Sequence
  elastin-like polypeptide
  MISC_FEATURE (1)..(1): Xaa can be any naturally occurring amino acid
  MISC_FEATURE (2)..(2): Xaa can be any naturally occurring amino acid
  MISC_FEATURE (4)..(4): Xaa can be any naturally occurring amino acid except Pro or Gly
  MISC_FEATURE (5)..(5): Xaa can be any naturally occurring amino acid except Pro or Gly
  MISC_FEATURE (6)..(6): Xaa can be any naturally occurring amino acid except Pro or Gly
  MISC_FEATURE (8)..(8): Xaa can be any naturally occurring amino acid
  MISC_FEATURE (9)..(9): Xaa can be any naturally occurring amino acid
  MISC_FEATURE (10)..(10): Xaa can be any naturally occurring amino acid
  MISC_FEATURE (12)..(12): Xaa can be any naturally occurring amino acid except Pro or Gly
  MISC_FEATURE (13)..(13): Xaa can be any naturally occurring amino acid except Pro or Gly
  MISC_FEATURE (14)..(14): Xaa can be any naturally occurring amino acid except Pro or Gly
  MISC_FEATURE (16)..(16): Xaa can be any naturally occurring amino acid
  MISC_FEATURE (17)..(17): Xaa can be any naturally occurring amino acid
  MISC_FEATURE (18)..(18): Xaa can be any naturally occurring amino acid
  MISC_FEATURE (20)..(20): Xaa can be any naturally occurring amino acid except Pro or Gly
  MISC_FEATURE (21)..(21): Xaa can be any naturally occurring amino acid except Pro or Gly
  MISC_FEATURE (22)..(22): Xaa can be any naturally occurring amino acid except Pro or Gly
  MISC_FEATURE (24)..(24): Xaa can be any naturally occurring amino acid
  MISC_FEATURE (25)..(25): Xaa can be any naturally occurring amino acid
  MISC_FEATURE (26)..(26): Xaa can be any naturally occurring amino acid
  MISC_FEATURE (28)..(28): Xaa can be any naturally occurring amino acid except Pro or Gly
  MISC_FEATURE (29)..(29): Xaa can be any naturally occurring amino acid except Pro or Gly
  MISC_FEATURE (30)..(30): Xaa can be any naturally occurring amino acid except Pro or Gly
  MISC_FEATURE (32)..(32): Xaa can be any naturally occurring amino acid
  MISC_FEATURE (33)..(33): Xaa can be any naturally occurring amino acid
  MISC_FEATURE (34)..(34): Xaa can be any naturally occurring amino acid
  MISC_FEATURE (36)..(36): Xaa can be any naturally occurring amino acid except Pro or Gly
  MISC_FEATURE (37)..(37): Xaa can be any naturally occurring amino acid except Pro or Gly
  MISC_FEATURE (38)..(38): Xaa can be any naturally occurring amino acid except Pro or Gly
  MISC_FEATURE (40)..(40): Xaa can be any naturally occurring amino acid
  MISC_FEATURE (41)..(41): Xaa can be any naturally occurring amino acid
  MISC_FEATURE (42)..(42): Xaa can be any naturally occurring amino acid
  MISC_FEATURE (44)..(44): Xaa can be any naturally occurring amino acid except Pro or Gly
  MISC_FEATURE (45)..(45): Xaa can be any naturally occurring amino acid except Pro or Gly
  MISC_FEATURE (46)..(46): Xaa can be any naturally occurring amino acid except Pro or Gly
  MISC_FEATURE (48)..(48): Xaa can be any naturally occurring amino acid
  MISC_FEATURE (49)..(49): Xaa can be any naturally occurring amino acid
  MISC_FEATURE (50)..(50): Xaa can be any naturally occurring amino acid
  MISC_FEATURE (52)..(52): Xaa can be any naturally occurring amino acid except Pro or Gly
  MISC_FEATURE (53)..(53): Xaa can be any naturally occurring amino acid except Pro or Gly
  MISC_FEATURE (54)..(54): Xaa can be any naturally occurring amino acid except Pro or Gly
  MISC_FEATURE (56)..(56): Xaa can be any naturally occurring amino acid
  MISC_FEATURE (57)..(57): Xaa can be any naturally occurring amino acid
  MISC_FEATURE (58)..(58): Xaa can be any naturally occurring amino acid
  MISC_FEATURE (60)..(60): Xaa can be any naturally occurring amino acid except Pro or Gly
  MISC_FEATURE (61)..(61): Xaa can be any naturally occurring amino acid except Pro or Gly
  MISC_FEATURE (62)..(62): Xaa can be any naturally occurring amino acid except Pro or Gly
  MISC_FEATURE (64)..(64): Xaa can be any naturally occurring amino acid
  MISC_FEATURE (65)..(65): Xaa can be any naturally occurring amino acid
  MISC_FEATURE (66)..(66): Xaa can be any naturally occurring amino acid
  MISC_FEATURE (68)..(68): Xaa can be any naturally occurring amino acid except Pro or Gly
  MISC_FEATURE (69)..(69): Xaa can be any naturally occurring amino acid except Pro or Gly
  MISC_FEATURE (70)..(70): Xaa can be any naturally occurring amino acid except Pro or Gly
  MISC_FEATURE (72)..(72): Xaa can be any naturally occurring amino acid
  MISC_FEATURE (73)..(73): Xaa can be any naturally occurring amino acid
  MISC_FEATURE (74)..(74): Xaa can be any naturally occurring amino acid
  MISC_FEATURE (76)..(76): Xaa can be any naturally occurring amino acid except Pro or Gly
  MISC_FEATURE (77)..(77): Xaa can be any naturally occurring amino acid except Pro or Gly
  MISC_FEATURE (78)..(78): Xaa can be any naturally occurring amino acid except Pro or Gly
  MISC_FEATURE (80)..(80): Xaa can be any naturally occurring amino acid
  MISC_FEATURE (81)..(1280): May be present or absent in groups of the repeat unit Xaa Xaa Pro Xaa Xaa Xaa Gly Xaa
  MISC_FEATURE (81)..(81): Xaa can be any naturally occurring amino acid
  MISC_FEATURE (82)..(82): Xaa can be any naturally occurring amino acid
  MISC_FEATURE (84)..(84): Xaa can be any naturally occurring amino acid except Pro or Gly
  MISC_FEATURE (85)..(85): Xaa can be any naturally occurring amino acid except Pro or Gly
  MISC_FEATURE (86)..(86): Xaa can be any naturally occurring amino acid except Pro or Gly
  MISC_FEATURE (88)..(88): Xaa can be any naturally occurring amino acid
  MISC_FEATURE (89)..(89): Xaa can be any naturally occurring amino acid
  MISC_FEATURE (90)..(90): Xaa can be any naturally occurring amino acid
  MISC_FEATURE (92)..(92): Xaa can be any naturally occurring amino acid except Pro or Gly
  MISC_FEATURE (93)..(93): Xaa can be any naturally occurring amino acid except Pro or Gly
  MISC_FEATURE (94)..(94): Xaa can be any naturally occurring amino acid except Pro or Gly
  MISC_FEATURE (96)..(96): Xaa can be any naturally occurring amino acid
  MISC_FEATURE (97)..(97): Xaa can be any naturally occurring amino acid
  MISC_FEATURE (98)..(98): Xaa can be any naturally occurring amino acid
  MISC_FEATURE (100)..(100): Xaa can be any naturally occurring amino acid except Pro or Gly
  MISC_FEATURE (101)..(101): Xaa can be any naturally occurring amino acid except Pro or Gly
  MISC_FEATURE (102)..(102): Xaa can be any naturally occurring amino acid except Pro or Gly
  MISC_FEATURE (104)..(104): Xaa can be any naturally occurring amino acid
  MISC_FEATURE (105)..(105): Xaa can be any naturally occurring amino acid
  MISC_FEATURE (106)..(106): Xaa can be any naturally occurring amino acid
  MISC_FEATURE (108)..(108): Xaa can be any naturally occurring amino acid except Pro or Gly
  MISC_FEATURE (109)..(109): Xaa can be any naturally occurring amino acid except Pro or Gly
  MISC_FEATURE (110)..(110): Xaa can be any naturally occurring amino acid except Pro or Gly
  MISC_FEATURE (112)..(112): Xaa can be any naturally occurring amino acid
  MISC_FEATURE (113)..(113): Xaa can be any naturally occurring amino acid
  MISC_FEATURE (114)..(114): Xaa can be any naturally occurring amino acid
  MISC_FEATURE (116)..(116): Xaa can be any naturally occurring amino acid except Pro or Gly
  MISC_FEATURE (117)..(117): Xaa can be any naturally occurring amino acid except Pro or Gly
  MISC_FEATURE (118)..(118): Xaa can be any naturally occurring amino acid except Pro or Gly
  MISC_FEATURE (120)..(120): Xaa can be any naturally occurring amino acid
  MISC_FEATURE (121)..(121): Xaa can be any naturally occurring amino acid
  MISC_FEATURE (122)..(122): Xaa can be any naturally occurring amino acid
  MISC_FEATURE (124)..(124): Xaa can be any naturally occurring amino acid except Pro or Gly
  MISC_FEATURE (125)..(125): Xaa can be any naturally occurring amino acid except Pro or Gly
  MISC_FEATURE (126)..(126): Xaa can be any naturally occurring amino acid except Pro or Gly
  MISC_FEATURE (128)..(128): Xaa can be any naturally occurring amino acid
  MISC_FEATURE (129)..(129): Xaa can be any naturally occurring amino acid
  MISC_FEATURE (130)..(130): Xaa can be any naturally occurring amino acid
  MISC_FEATURE (132)..(132): Xaa can be any naturally occurring amino acid except Pro or Gly
  MISC_FEATURE (133)..(133): Xaa can be any naturally occurring amino acid except Pro or Gly
  MISC_FEATURE (134)..(134): Xaa can be any naturally occurring amino acid except Pro or Gly
  MISC_FEATURE (136)..(136): Xaa can be any naturally occurring amino acid
  MISC_FEATURE (137)..(137): Xaa can be any naturally occurring amino acid
  MISC_FEATURE (138)..(138): Xaa can be any naturally occurring amino acid
  MISC_FEATURE (140)..(140): Xaa can be any naturally occurring amino acid except Pro or Gly
  MISC_FEATURE (141)..(141): Xaa can be any naturally occurring amino acid except Pro or Gly
  MISC_FEATURE (142)..(142): Xaa can be any naturally occurring amino acid except Pro or Gly
  MISC_FEATURE (144)..(144): Xaa can be any naturally occurring amino acid
  MISC_FEATURE (145)..(145): Xaa can be any naturally occurring amino acid
  MISC_FEATURE (146)..(146): Xaa can be any naturally occurring amino acid
  MISC_FEATURE (148)..(148): Xaa can be any naturally occurring amino acid except Pro or Gly
  MISC_FEATURE (149)..(149): Xaa can be any naturally occurring amino acid except Pro or Gly
  MISC_FEATURE (150)..(150): Xaa can be any naturally occurring amino acid except Pro or Gly
  MISC_FEATURE (152)..(152): Xaa can be any naturally occurring amino acid
  MISC_FEATURE (153)..(153): Xaa can be any naturally occurring amino acid
  MISC_FEATURE (154)..(154): Xaa can be any naturally occurring amino acid
  MISC_FEATURE (156)..(156): Xaa can be any naturally occurring amino acid except Pro or Gly
  MISC_FEATURE (157)..(157): Xaa can be any naturally occurring amino acid except Pro or Gly
  MISC_FEATURE (158)..(158): Xaa can be any naturally occurring amino acid except Pro or Gly
  MISC_FEATURE (160)..(160): Xaa can be any naturally occurring amino acid
  MISC_FEATURE (161)..(161): Xaa can be any naturally occurring amino acid
  MISC_FEATURE (162)..(162): Xaa can be any naturally occurring amino acid
  MISC_FEATURE (164)..(164): Xaa can be any naturally occurring amino acid except Pro or Gly
  MISC_FEATURE (165)..(165): Xaa can be any naturally occurring amino acid except Pro or Gly
  MISC_FEATURE (166)..(166): Xaa can be any naturally occurring amino acid except Pro or Gly
  MISC_FEATURE (168)..(168): Xaa can be any naturally occurring amino acid
  MISC_FEATURE (169)..(169): Xaa can be any naturally occurring amino acid
  MISC_FEATURE (170)..(170): Xaa can be any naturally occurring amino acid
  MISC_FEATURE (172)..(172): Xaa can be any naturally occurring amino acid except Pro or Gly
  MISC_FEATURE (173)..(173): Xaa can be any naturally occurring amino acid except Pro or Gly
  MISC_FEATURE (174)..(174): Xaa can be any naturally occurring amino acid except Pro or Gly
  MISC_FEATURE (176)..(176): Xaa can be any naturally occurring amino acid
  MISC_FEATURE (177)..(177): Xaa can be any naturally occurring amino acid
  MISC_FEATURE (178)..(178): Xaa can be any naturally occurring amino acid
  MISC_FEATURE (180)..(180): Xaa can be any naturally occurring amino acid except Pro or Gly
  MISC_FEATURE (181)..(181): Xaa can be any naturally occurring amino acid except Pro or Gly
  MISC_FEATURE (182)..(182): Xaa can be any naturally occurring amino acid except Pro or Gly
  MISC_FEATURE (184)..(184): Xaa can be any naturally occurring amino acid
  MISC_FEATURE (185)..(185): Xaa can be any naturally occurring amino acid
  MISC_FEATURE (186)..(186): Xaa can be any naturally occurring amino acid
  MISC_FEATURE (188)..(188): Xaa can be any naturally occurring amino acid except Pro or Gly
  MISC_FEATURE (189)..(189): Xaa can be any naturally occurring amino acid except Pro or Gly
  MISC_FEATURE (190)..(190): Xaa can be any naturally occurring amino acid except Pro or Gly
  MISC_FEATURE (192)..(192): Xaa can be any naturally occurring amino acid
  MISC_FEATURE (193)..(193): Xaa can be any naturally occurring amino acid
  MISC_FEATURE (194)..(194): Xaa can be any naturally occurring amino acid
  MISC_FEATURE (196)..(196): Xaa can be any naturally occurring amino acid except Pro or Gly
  MISC_FEATURE (197)..(197): Xaa can be any naturally occurring amino acid except Pro or Gly
  MISC_FEATURE (198)..(198): Xaa can be any naturally occurring amino acid except Pro or Gly
  MISC_FEATURE (200)..(200): Xaa can be any naturally occurring amino acid
  MISC_FEATURE (201)..(201): Xaa can be any naturally occurring amino acid
  MISC_FEATURE (202)..(202): Xaa can be any naturally occurring amino acid
  MISC_FEATURE (204)..(204): Xaa can be any naturally occurring amino acid except Pro or Gly
  MISC_FEATURE (205)..(205): Xaa can be any naturally occurring amino acid except Pro or Gly
  MISC_FEATURE (206)..(206): Xaa can be any naturally occurring amino acid except Pro or Gly
  MISC_FEATURE (208)..(208): Xaa can be any naturally occurring amino acid
  MISC_FEATURE (209)..(209): Xaa can be any naturally occurring amino acid
  MISC_FEATURE (210)..(210): Xaa can be any naturally occurring amino acid
  MISC_FEATURE (212)..(212): Xaa can be any naturally occurring amino acid except Pro or Gly
  MISC_FEATURE (213)..(213): Xaa can be any naturally occurring amino acid except Pro or Gly
  MISC_FEATURE (214)..(214): Xaa can be any naturally occurring amino acid except Pro or Gly
  MISC_FEATURE (216)..(216): Xaa can be any naturally occurring amino acid
  MISC_FEATURE (217)..(217): Xaa can be any naturally occurring amino acid
  MISC_FEATURE (218)..(218): Xaa can be any naturally occurring amino acid
  MISC_FEATURE (220)..(220): Xaa can be any naturally occurring amino acid except Pro or Gly
  MISC_FEATURE (221)..(221): Xaa can be any naturally occurring amino acid except Pro or Gly
  MISC_FEATURE (222)..(222): Xaa can be any naturally occurring amino acid except Pro or Gly
  MISC_FEATURE (224)..(224): Xaa can be any naturally occurring amino acid
  MISC_FEATURE (225)..(225): Xaa can be any naturally occurring amino acid
  MISC_FEATURE (226)..(226): Xaa can be any naturally occurring amino acid
  MISC_FEATURE (228)..(228): Xaa can be any naturally occurring amino acid except Pro or Gly
  MISC_FEATURE (229)..(229): Xaa can be any naturally occurring amino acid except Pro or Gly
  MISC_FEATURE (230)..(230): Xaa can be any naturally occurring amino acid except Pro or Gly
  MISC_FEATURE (232)..(232): Xaa can be any naturally occurring amino acid
  MISC_FEATURE (233)..(233): Xaa can be any naturally occurring amino acid
  MISC_FEATURE (234)..(234): Xaa can be any naturally occurring amino acid
  MISC_FEATURE (236)..(236): Xaa can be any naturally occurring amino acid except Pro or Gly
  MISC_FEATURE (237)..(237): Xaa can be any naturally occurring amino acid except Pro or Gly
  MISC_FEATURE (238)..(238): Xaa can be any naturally occurring amino acid except Pro or Gly
  MISC_FEATURE (240)..(240): Xaa can be any naturally occurring amino acid
  MISC_FEATURE (241)..(241): Xaa can be any naturally occurring amino acid
  MISC_FEATURE (242)..(242): Xaa can be any naturally occurring amino acid
  MISC_FEATURE (244)..(244): Xaa can be any naturally occurring amino acid except Pro or Gly
  MISC_FEATURE (245)..(245): Xaa can be any naturally occurring amino acid except Pro or Gly
  MISC_FEATURE (246)..(246): Xaa can be any naturally occurring amino acid except Pro or Gly
  MISC_FEATURE (248)..(248): Xaa can be any naturally occurring amino acid
  MISC_FEATURE (249)..(249): Xaa can be any naturally occurring amino acid
  MISC_FEATURE (250)..(250): Xaa can be any naturally occurring amino acid
  MISC_FEATURE (252)..(252): Xaa can be any naturally occurring amino acid except Pro or Gly
  MISC_FEATURE (253)..(253): Xaa can be any naturally occurring amino acid except Pro or Gly
  MISC_FEATURE (254)..(254): Xaa can be any naturally occurring amino acid except Pro or Gly
  MISC_FEATURE (256)..(256): Xaa can be any naturally occurring amino acid
  MISC_FEATURE (257)..(257): Xaa can be any naturally occurring amino acid
  MISC_FEATURE (258)..(258): Xaa can be any naturally occurring amino acid
  MISC_FEATURE (260)..(260): Xaa can be any naturally occurring amino acid except Pro or Gly
  MISC_FEATURE (261)..(261): Xaa can be any naturally occurring amino acid except Pro or Gly
  MISC_FEATURE (262)..(262): Xaa can be any naturally occurring amino acid except Pro or Gly
  MISC_FEATURE (264)..(264): Xaa can be any naturally occurring amino acid
  MISC_FEATURE (265)..(265): Xaa can be any naturally occurring amino acid
  MISC_FEATURE (266)..(266): Xaa can be any naturally occurring amino acid
  MISC_FEATURE (268)..(268): Xaa can be any naturally occurring amino acid except Pro or Gly
  MISC_FEATURE (269)..(269): Xaa can be any naturally occurring amino acid except Pro or Gly
  MISC_FEATURE (270)..(270): Xaa can be any naturally occurring amino acid except Pro or Gly
  MISC_FEATURE (272)..(272): Xaa can be any naturally occurring amino acid
  MISC_FEATURE (273)..(273): Xaa can be any naturally occurring amino acid
  MISC_FEATURE (274)..(274): Xaa can be any naturally occurring amino acid
  MISC_FEATURE (276)..(276): Xaa can be any naturally occurring amino acid except Pro or Gly
  MISC_FEATURE (277)..(277): Xaa can be any naturally occurring amino acid except Pro or Gly
  MISC_FEATURE (278)..(278): Xaa can be any naturally occurring amino acid except Pro or Gly
  MISC_FEATURE (280)..(280): Xaa can be any naturally occurring amino acid
  MISC_FEATURE (281)..(281): Xaa can be any naturally occurring amino acid
  MISC_FEATURE (282)..(282): Xaa can be any naturally occurring amino acid
  MISC_FEATURE (284)..(284): Xaa can be any naturally occurring amino acid except Pro or Gly
  MISC_FEATURE (285)..(285): Xaa can be any naturally occurring amino acid except Pro or Gly
  MISC_FEATURE (286)..(286): Xaa can be any naturally occurring amino acid except Pro or Gly
  MISC_FEATURE (288)..(288): Xaa can be any naturally occurring amino acid
  MISC_FEATURE (289)..(289): Xaa can be any naturally occurring amino acid
  MISC_FEATURE (290)..(290): Xaa can be any naturally occurring amino acid
  MISC_FEATURE (292)..(292): Xaa can be any naturally occurring amino acid except Pro or Gly
  MISC_FEATURE (293)..(293): Xaa can be any naturally occurring amino acid except Pro or Gly
  MISC_FEATURE (294)..(294): Xaa can be any naturally occurring amino acid except Pro or Gly
  MISC_FEATURE (296)..(296): Xaa can be any naturally occurring amino acid
  MISC_FEATURE (297)..(297): Xaa can be any naturally occurring amino acid
  MISC_FEATURE (298)..(298): Xaa can be any naturally occurring amino acid
  MISC_FEATURE (300)..(300): Xaa can be any naturally occurring amino acid except Pro or Gly
  MISC_FEATURE (301)..(301): Xaa can be any naturally occurring amino acid except Pro or Gly
  MISC_FEATURE (302)..(302): Xaa can be any naturally occurring amino acid except Pro or Gly
  MISC_FEATURE (304)..(304): Xaa can be any naturally occurring amino acid
  MISC_FEATURE (305)..(305): Xaa can be any naturally occurring amino acid
  MISC_FEATURE (306)..(306): Xaa can be any naturally occurring amino acid
  MISC_FEATURE (308)..(308): Xaa can be any naturally occurring amino acid except Pro or Gly
  MISC_FEATURE (309)..(309): Xaa can be any naturally occurring amino acid except Pro or Gly
  MISC_FEATURE (310)..(310): Xaa can be any naturally occurring amino acid except Pro or Gly
  MISC_FEATURE (312)..(312): Xaa can be any naturally occurring amino acid
  MISC_FEATURE (313)..(313): Xaa can be any naturally occurring amino acid
  MISC_FEATURE (314)..(314): Xaa can be any naturally occurring amino acid
  MISC_FEATURE (316)..(316): Xaa can be any naturally occurring amino acid except Pro or Gly
  MISC_FEATURE (317)..(317): Xaa can be any naturally occurring amino acid except Pro or Gly
  MISC_FEATURE (318)..(318): Xaa can be any naturally occurring amino acid except Pro or Gly
  MISC_FEATURE (320)..(320): Xaa can be any naturally occurring amino acid
  MISC_FEATURE (321)..(321): Xaa can be any naturally occurring amino acid
  MISC_FEATURE (322)..(322): Xaa can be any naturally occurring amino acid
  MISC_FEATURE (324)..(324): Xaa can be any naturally occurring amino acid except Pro or Gly
  MISC_FEATURE (325)..(325): Xaa can be any naturally occurring amino acid except Pro or Gly
  MISC_FEATURE (326)..(326): Xaa can be any naturally occurring amino acid except Pro or Gly
  MISC_FEATURE (328)..(328): Xaa can be any naturally occurring amino acid
  MISC_FEATURE (329)..(329): Xaa can be any naturally occurring amino acid
  MISC_FEATURE (330)..(330): Xaa can be any naturally occurring amino acid
  MISC_FEATURE (332)..(332): Xaa can be any naturally occurring amino acid except Pro or Gly
  MISC_FEATURE (333)..(333): Xaa can be any naturally occurring amino acid except Pro or Gly
  MISC_FEATURE (334)..(334): Xaa can be any naturally occurring amino acid except Pro or Gly
  MISC_FEATURE (336)..(336): Xaa can be any naturally occurring amino acid
  MISC_FEATURE (337)..(337): Xaa can be any naturally occurring amino acid
  MISC_FEATURE (338)..(338): Xaa can be any naturally occurring amino acid
  MISC_FEATURE (340)..(340): Xaa can be any naturally occurring amino acid except Pro or Gly
  MISC_FEATURE (341)..(341): Xaa can be any naturally occurring amino acid except Pro or Gly
  MISC_FEATURE (342)..(342): Xaa can be any naturally occurring amino acid except Pro or Gly
  MISC_FEATURE (344)..(344): Xaa can be any naturally occurring amino acid
  MISC_FEATURE (345)..(345): Xaa can be any naturally occurring amino acid
  MISC_FEATURE (346)..(346): Xaa can be any naturally occurring amino acid
  MISC_FEATURE (348)..(348): Xaa can be any naturally occurring amino acid except Pro or Gly
  MISC_FEATURE (349)..(349): Xaa can be any naturally occurring amino acid except Pro or Gly
  MISC_FEATURE (350)..(350): Xaa can be any naturally occurring amino acid except Pro or Gly
  MISC_FEATURE (352)..(352): Xaa can be any naturally occurring amino acid
  MISC_FEATURE (353)..(353): Xaa can be any naturally occurring amino acid
  MISC_FEATURE (354)..(354): Xaa can be any naturally occurring amino acid
  MISC_FEATURE (356)..(356): Xaa can be any naturally occurring amino acid except Pro or Gly
  MISC_FEATURE (357)..(357): Xaa can be any naturally occurring amino acid except Pro or Gly
  MISC_FEATURE (358)..(358): Xaa can be any naturally occurring amino acid except Pro or Gly
  MISC_FEATURE (360)..(360): Xaa can be any naturally occurring amino acid
  MISC_FEATURE (361)..(361): Xaa can be any naturally occurring amino acid
  MISC_FEATURE (362)..(362): Xaa can be any naturally occurring amino acid
  MISC_FEATURE (364)..(364): Xaa can be any naturally occurring amino acid except Pro or Gly
  MISC_FEATURE (365)..(365): Xaa can be any naturally occurring amino acid except Pro or Gly
  MISC_FEATURE (366)..(366): Xaa can be any naturally occurring amino acid except Pro or Gly
  MISC_FEATURE (368)..(368): Xaa can be any naturally occurring amino acid
  MISC_FEATURE (369)..(369): Xaa can be any naturally occurring amino acid
  MISC_FEATURE (370)..(370): Xaa can be any naturally occurring amino acid
  MISC_FEATURE (372)..(372): Xaa can be any naturally occurring amino acid except Pro or Gly
  MISC_FEATURE (373)..(373): Xaa can be any naturally occurring amino acid except Pro or Gly
  MISC_FEATURE (374)..(374): Xaa can be any naturally occurring amino acid except Pro or Gly
  MISC_FEATURE (376)..(376): Xaa can be any naturally occurring amino acid
  MISC_FEATURE (377)..(377): Xaa can be any naturally occurring amino acid
  MISC_FEATURE (378)..(378): Xaa can be any naturally occurring amino acid
  MISC_FEATURE (380)..(380): Xaa can be any naturally occurring amino acid except Pro or Gly
  MISC_FEATURE (381)..(381): Xaa can be any naturally occurring amino acid except Pro or Gly
  MISC_FEATURE (382)..(382): Xaa can be any naturally occurring amino acid except Pro or Gly
  MISC_FEATURE (384)..(384): Xaa can be any naturally occurring amino acid
  MISC_FEATURE (385)..(385): Xaa can be any naturally occurring amino acid
  MISC_FEATURE (386)..(386): Xaa can be any naturally occurring amino acid
  MISC_FEATURE (388)..(388): Xaa can be any naturally occurring amino acid except Pro or Gly
  MISC_FEATURE (389)..(389): Xaa can be any naturally occurring amino acid except Pro or Gly
  MISC_FEATURE (390)..(390): Xaa can be any naturally occurring amino acid except Pro or Gly
  MISC_FEATURE (392)..(392): Xaa can be any naturally occurring amino acid
  MISC_FEATURE (393)..(393): Xaa can be any naturally occurring amino acid
  MISC_FEATURE (394)..(394): Xaa can be any naturally occurring amino acid
  MISC_FEATURE (396)..(396): Xaa can be any naturally occurring amino acid except Pro or Gly
  MISC_FEATURE (397)..(397): Xaa can be any naturally occurring amino acid except Pro or Gly
  MISC_FEATURE (398)..(398): Xaa can be any naturally occurring amino acid except Pro or Gly
  MISC_FEATURE (400)..(400): Xaa can be any naturally occurring amino acid
  MISC_FEATURE (401)..(401): Xaa can be any naturally occurring amino acid
  MISC_FEATURE (402)..(402): Xaa can be any naturally occurring amino acid
  MISC_FEATURE (404)..(404): Xaa can be any naturally occurring amino acid except Pro or Gly
  MISC_FEATURE (405)..(405): Xaa can be any naturally occurring amino acid except Pro or Gly
  MISC_FEATURE (406)..(406): Xaa can be any naturally occurring amino acid except Pro or Gly
  MISC_FEATURE (408)..(408): Xaa can be any naturally occurring amino acid
  MISC_FEATURE (409)..(409): Xaa can be any naturally occurring amino acid
  MISC_FEATURE (410)..(410): Xaa can be any naturally occurring amino acid
  MISC_FEATURE (412)..(412): Xaa can be any naturally occurring amino acid except Pro or Gly
  MISC_FEATURE (413)..(413): Xaa can be any naturally occurring amino acid except Pro or Gly
  MISC_FEATURE (414)..(414): Xaa can be any naturally occurring amino acid except Pro or Gly
  MISC_FEATURE (416)..(416): Xaa can be any naturally occurring amino acid
  MISC_FEATURE (417)..(417): Xaa can be any naturally occurring amino acid
  MISC_FEATURE (418)..(418): Xaa can be any naturally occurring amino acid
  MISC_FEATURE (420)..(420): Xaa can be any naturally occurring amino acid except Pro or Gly
  MISC_FEATURE (421)..(421): Xaa can be any naturally occurring amino acid except Pro or Gly
  MISC_FEATURE (422)..(422): Xaa can be any naturally occurring amino acid except Pro or Gly
  MISC_FEATURE (424)..(424): Xaa can be any naturally occurring amino acid
  MISC_FEATURE (425)..(425): Xaa can be any naturally occurring amino acid
  MISC_FEATURE (426)..(426): Xaa can be any naturally occurring amino acid
  MISC_FEATURE (428)..(428): Xaa can be any naturally occurring amino acid except Pro or Gly
  MISC_FEATURE (429)..(429): Xaa can be any naturally occurring amino acid except Pro or Gly
  MISC_FEATURE (430)..(430): Xaa can be any naturally occurring amino acid except Pro or Gly
  MISC_FEATURE (432)..(432): Xaa can be any naturally occurring amino acid
  MISC_FEATURE (433)..(433): Xaa can be any naturally occurring amino acid
  MISC_FEATURE (434)..(434): Xaa can be any naturally occurring amino acid
  MISC_FEATURE (436)..(436): Xaa can be any naturally occurring amino acid except Pro or Gly
  MISC_FEATURE (437)..(437): Xaa can be any naturally occurring amino acid except Pro or Gly
  MISC_FEATURE (438)..(438): Xaa can be any naturally occurring amino acid except Pro or Gly
  MISC_FEATURE (440)..(440): Xaa can be any naturally occurring amino acid
  MISC_FEATURE (441)..(441): Xaa can be any naturally occurring amino acid
  MISC_FEATURE (442)..(442): Xaa can be any naturally occurring amino acid
  MISC_FEATURE (444)..(444): Xaa can be any naturally occurring amino acid except Pro or Gly
  MISC_FEATURE (445)..(445): Xaa can be any naturally occurring amino acid except Pro or Gly
  MISC_FEATURE (446)..(446): Xaa can be any naturally occurring amino acid except Pro or Gly
  MISC_FEATURE (448)..(448): Xaa can be any naturally occurring amino acid
  MISC_FEATURE (449)..(449): Xaa can be any naturally occurring amino acid
  MISC_FEATURE (450)..(450): Xaa can be any naturally occurring amino acid
  MISC_FEATURE (452)..(452): Xaa can be any naturally occurring amino acid except Pro or Gly
  MISC_FEATURE (453)..(453): Xaa can be any naturally occurring amino acid except Pro or Gly
  MISC_FEATURE (454)..(454): Xaa can be any naturally occurring amino acid except Pro or Gly
  MISC_FEATURE (456)..(456): Xaa can be any naturally occurring amino acid
  MISC_FEATURE (457)..(457): Xaa can be any naturally occurring amino acid
  MISC_FEATURE (458)..(458): Xaa can be any naturally occurring amino acid
  MISC_FEATURE (460)..(460): Xaa can be any naturally occurring amino acid except Pro or Gly
  MISC_FEATURE (461)..(461): Xaa can be any naturally occurring amino acid except Pro or Gly
  MISC_FEATURE (462)..(462): Xaa can be any naturally occurring amino acid except Pro or Gly
  MISC_FEATURE (464)..(464): Xaa can be any naturally occurring amino acid
  MISC_FEATURE (465)..(465): Xaa can be any naturally occurring amino acid
  MISC_FEATURE (466)..(466): Xaa can be any naturally occurring amino acid
  MISC_FEATURE (468)..(468): Xaa can be any naturally occurring amino acid except Pro or Gly
  MISC_FEATURE (469)..(469): Xaa can be any naturally occurring amino acid except Pro or Gly
  MISC_FEATURE (470)..(470): Xaa can be any naturally occurring amino acid except Pro or Gly
  MISC_FEATURE (472)..(472): Xaa can be any naturally occurring amino acid
  MISC_FEATURE (473)..(473): Xaa can be any naturally occurring amino acid
  MISC_FEATURE (474)..(474): Xaa can be any naturally occurring amino acid
  MISC_FEATURE (476)..(476): Xaa can be any naturally occurring amino acid except Pro or Gly
  MISC_FEATURE (477)..(477): Xaa can be any naturally occurring amino acid except Pro or Gly
  MISC_FEATURE (478)..(478): Xaa can be any naturally occurring amino acid except Pro or Gly
  MISC_FEATURE (480)..(480): Xaa can be any naturally occurring amino acid
  MISC_FEATURE (481)..(481): Xaa can be any naturally occurring amino acid
  MISC_FEATURE (482)..(482): Xaa can be any naturally occurring amino acid
  MISC_FEATURE (484)..(484): Xaa can be any naturally occurring amino acid except Pro or Gly
  MISC_FEATURE (485)..(485): Xaa can be any naturally occurring amino acid except Pro or Gly
  MISC_FEATURE (486)..(486): Xaa can be any naturally occurring amino acid except Pro or Gly
  MISC_FEATURE (488)..(488): Xaa can be any naturally occurring amino acid
  MISC_FEATURE (489)..(489): Xaa can be any naturally occurring amino acid
  MISC_FEATURE (490)..(490): Xaa can be any naturally occurring amino acid
  MISC_FEATURE (492)..(492): Xaa can be any naturally occurring amino acid except Pro or Gly
  MISC_FEATURE (493)..(493): Xaa can be any naturally occurring amino acid except Pro or Gly
  MISC_FEATURE (494)..(494): Xaa can be any naturally occurring amino acid except Pro or Gly
  MISC_FEATURE (496)..(496): Xaa can be any naturally occurring amino acid
  MISC_FEATURE (497)..(497): Xaa can be any naturally occurring amino acid
  MISC_FEATURE (498)..(498): Xaa can be any naturally occurring amino acid
  MISC_FEATURE (500)..(500): Xaa can be any naturally occurring amino acid except Pro or Gly
  MISC_FEATURE (501)..(501): Xaa can be any naturally occurring amino acid except Pro or Gly
  MISC_FEATURE (502)..(502): Xaa can be any naturally occurring amino acid except Pro or Gly
  MISC_FEATURE (504)..(504): Xaa can be any naturally occurring amino acid
  MISC_FEATURE (505)..(505): Xaa can be any naturally occurring amino acid
  MISC_FEATURE (506)..(506): Xaa can be any naturally occurring amino acid
  MISC_FEATURE (508)..(508): Xaa can be any naturally occurring amino acid except Pro or Gly
  MISC_FEATURE (509)..(509): Xaa can be any naturally occurring amino acid except Pro or Gly
  MISC_FEATURE (510)..(510): Xaa can be any naturally occurring amino acid except Pro or Gly
  MISC_FEATURE (512)..(512): Xaa can be any naturally occurring amino acid
  MISC_FEATURE (513)..(513): Xaa can be any naturally occurring amino acid
  MISC_FEATURE (514)..(514): Xaa can be any naturally occurring amino acid
  MISC_FEATURE (516)..(516): Xaa can be any naturally occurring amino acid except Pro or Gly
  MISC_FEATURE (517)..(517): Xaa can be any naturally occurring amino acid except Pro or Gly
  MISC_FEATURE (518)..(518): Xaa can be any naturally occurring amino acid except Pro or Gly
  MISC_FEATURE (520)..(520): Xaa can be any naturally occurring amino acid
  MISC_FEATURE (521)..(521): Xaa can be any naturally occurring amino acid
  MISC_FEATURE (522)..(522): Xaa can be any naturally occurring amino acid
  MISC_FEATURE (524)..(524): Xaa can be any naturally occurring amino acid except Pro or Gly
  MISC_FEATURE (525)..(525): Xaa can be any naturally occurring amino acid except Pro or Gly
  MISC_FEATURE (526)..(526): Xaa can be any naturally occurring amino acid except Pro or Gly
  MISC_FEATURE (528)..(528): Xaa can be any naturally occurring amino acid
  MISC_FEATURE (529)..(529): Xaa can be any naturally occurring amino acid
  MISC_FEATURE (530)..(530): Xaa can be any naturally occurring amino acid
  MISC_FEATURE (532)..(532): Xaa can be any naturally occurring amino acid except Pro or Gly
  MISC_FEATURE (533)..(533): Xaa can be any naturally occurring amino acid except Pro or Gly
  MISC_FEATURE (534)..(534): Xaa can be any naturally occurring amino acid except Pro or Gly
  MISC_FEATURE (536)..(536): Xaa can be any naturally occurring amino acid
  MISC_FEATURE (537)..(537): Xaa can be any naturally occurring amino acid
  MISC_FEATURE (538)..(538): Xaa can be any naturally occurring amino acid
  MISC_FEATURE (540)..(540): Xaa can be any naturally occurring amino acid except Pro or Gly
  MISC_FEATURE (541)..(541): Xaa can be any naturally occurring amino acid except Pro or Gly
  MISC_FEATURE (542)..(542): Xaa can be any naturally occurring amino acid except Pro or Gly
  MISC_FEATURE (544)..(544): Xaa can be any naturally occurring amino acid
  MISC_FEATURE (545)..(545): Xaa can be any naturally occurring amino acid
  MISC_FEATURE (546)..(546): Xaa can be any naturally occurring amino acid
  MISC_FEATURE (548)..(548): Xaa can be any naturally occurring amino acid except Pro or Gly
  MISC_FEATURE (549)..(549): Xaa can be any naturally occurring amino acid except Pro or Gly
  MISC_FEATURE (550)..(550): Xaa can be any naturally occurring amino acid except Pro or Gly
  MISC_FEATURE (552)..(552): Xaa can be any naturally occurring amino acid
  MISC_FEATURE (553)..(553): Xaa can be any naturally occurring amino acid
  MISC_FEATURE (554)..(554): Xaa can be any naturally occurring amino acid
  MISC_FEATURE (556)..(556): Xaa can be any naturally occurring amino acid except Pro or Gly
  MISC_FEATURE (557)..(557): Xaa can be any naturally occurring amino acid except Pro or Gly
  MISC_FEATURE (558)..(558): Xaa can be any naturally occurring amino acid except Pro or Gly
  MISC_FEATURE (560)..(560): Xaa can be any naturally occurring amino acid
  MISC_FEATURE (561)..(561): Xaa can be any naturally occurring amino acid
  MISC_FEATURE (562)..(562): Xaa can be any naturally occurring amino acid
  MISC_FEATURE (564)..(564): Xaa can be any naturally occurring amino acid except Pro or Gly
  MISC_FEATURE (565)..(565): Xaa can be any naturally occurring amino acid except Pro or Gly
  MISC_FEATURE (566)..(566): Xaa can be any naturally occurring amino acid except Pro or Gly
  MISC_FEATURE (568)..(568): Xaa can be any naturally occurring amino acid
  MISC_FEATURE (569)..(569): Xaa can be any naturally occurring amino acid
  MISC_FEATURE (570)..(570): Xaa can be any naturally occurring amino acid
  MISC_FEATURE (572)..(572): Xaa can be any naturally occurring amino acid except Pro or Gly
  MISC_FEATURE (573)..(573): Xaa can be any naturally occurring amino acid except Pro or Gly
  MISC_FEATURE (574)..(574): Xaa can be any naturally occurring amino acid except Pro or Gly
  MISC_FEATURE (576)..(576): Xaa can be any naturally occurring amino acid
  MISC_FEATURE (577)..(577): Xaa can be any naturally occurring amino acid
  MISC_FEATURE (578)..(578): Xaa can be any naturally occurring amino acid
  MISC_FEATURE (580)..(580): Xaa can be any naturally occurring amino acid except Pro or Gly
  MISC_FEATURE (581)..(581): Xaa can be any naturally occurring amino acid except Pro or Gly
  MISC_FEATURE (582)..(582): Xaa can be any naturally occurring amino acid except Pro or Gly
  MISC_FEATURE (584)..(584): Xaa can be any naturally occurring amino acid
  MISC_FEATURE (585)..(585): Xaa can be any naturally occurring amino acid
  MISC_FEATURE (586)..(586): Xaa can be any naturally occurring amino acid
  MISC_FEATURE (588)..(588): Xaa can be any naturally occurring amino acid except Pro or Gly
  MISC_FEATURE (589)..(589): Xaa can be any naturally occurring amino acid except Pro or Gly
  MISC_FEATURE (590)..(590): Xaa can be any naturally occurring amino acid except Pro or Gly
  MISC_FEATURE (592)..(592): Xaa can be any naturally occurring amino acid
  MISC_FEATURE (593)..(593): Xaa can be any naturally occurring amino acid
  MISC_FEATURE (594)..(594): Xaa can be any naturally occurring amino acid
  MISC_FEATURE (596)..(596): Xaa can be any naturally occurring amino acid except Pro or Gly
  MISC_FEATURE (597)..(597): Xaa can be any naturally occurring amino acid except Pro or Gly
  MISC_FEATURE (598)..(598): Xaa can be any naturally occurring amino acid except Pro or Gly
  MISC_FEATURE (600)..(600): Xaa can be any naturally occurring amino acid
  MISC_FEATURE (601)..(601): Xaa can be any naturally occurring amino acid
  MISC_FEATURE (602)..(602): Xaa can be any naturally occurring amino acid
  MISC_FEATURE (604)..(604): Xaa can be any naturally occurring amino acid except Pro or Gly
  MISC_FEATURE (605)..(605): Xaa can be any naturally occurring amino acid except Pro or Gly
  MISC_FEATURE (606)..(606): Xaa can be any naturally occurring amino acid except Pro or Gly
  MISC_FEATURE (608)..(608): Xaa can be any naturally occurring amino acid
  MISC_FEATURE (609)..(609): Xaa can be any naturally occurring amino acid
  MISC_FEATURE (610)..(610): Xaa can be any naturally occurring amino acid
  MISC_FEATURE (612)..(612): Xaa can be any naturally occurring amino acid except Pro or Gly
  MISC_FEATURE (613)..(613): Xaa can be any naturally occurring amino acid except Pro or Gly
  MISC_FEATURE (614)..(614): Xaa can be any naturally occurring amino acid except Pro or Gly
  MISC_FEATURE (616)..(616): Xaa can be any naturally occurring amino acid
  MISC_FEATURE (617)..(617): Xaa can be any naturally occurring amino acid
  MISC_FEATURE (618)..(618): Xaa can be any naturally occurring amino acid
  MISC_FEATURE (620)..(620): Xaa can be any naturally occurring amino acid except Pro or Gly
  MISC_FEATURE (621)..(621): Xaa can be any naturally occurring amino acid except Pro or Gly
  MISC_FEATURE (622)..(622): Xaa can be any naturally occurring amino acid except Pro or Gly
  MISC_FEATURE (624)..(624): Xaa can be any naturally occurring amino acid
  MISC_FEATURE (625)..(625): Xaa can be any naturally occurring amino acid
  MISC_FEATURE (626)..(626): Xaa can be any naturally occurring amino acid
  MISC_FEATURE (628)..(628): Xaa can be any naturally occurring amino acid except Pro or Gly
  MISC_FEATURE (629)..(629): Xaa can be any naturally occurring amino acid except Pro or Gly
  MISC_FEATURE (630)..(630): Xaa can be any naturally occurring amino acid except Pro or Gly
  MISC_FEATURE (632)..(632): Xaa can be any naturally occurring amino acid
  MISC_FEATURE (633)..(633): Xaa can be any naturally occurring amino acid
  MISC_FEATURE (634)..(634): Xaa can be any naturally occurring amino acid
  MISC_FEATURE (636)..(636): Xaa can be any naturally occurring amino acid except Pro or Gly
  MISC_FEATURE (637)..(637): Xaa can be any naturally occurring amino acid except Pro or Gly
  MISC_FEATURE (638)..(638): Xaa can be any naturally occurring amino acid except Pro or Gly
  MISC_FEATURE (640)..(640): Xaa can be any naturally occurring amino acid
  MISC_FEATURE (641)..(641): Xaa can be any naturally occurring amino acid
  MISC_FEATURE (642)..(642): Xaa can be any naturally occurring amino acid
  MISC_FEATURE (644)..(644): Xaa can be any naturally occurring amino acid except Pro or Gly
  MISC_FEATURE (645)..(645): Xaa can be any naturally occurring amino acid except Pro or Gly
  MISC_FEATURE (646)..(646): Xaa can be any naturally occurring amino acid except Pro or Gly
  MISC_FEATURE (648)..(648): Xaa can be any naturally occurring amino acid
  MISC_FEATURE (649)..(649): Xaa can be any naturally occurring amino acid
  MISC_FEATURE (650)..(650): Xaa can be any naturally occurring amino acid
  MISC_FEATURE (652)..(652): Xaa can be any naturally occurring amino acid except Pro or Gly
  MISC_FEATURE (653)..(653): Xaa can be any naturally occurring amino acid except Pro or Gly
  MISC_FEATURE (654)..(654): Xaa can be any naturally occurring amino acid except Pro or Gly
  MISC_FEATURE (656)..(656): Xaa can be any naturally occurring amino acid
  MISC_FEATURE (657)..(657): Xaa can be any naturally occurring amino acid
  MISC_FEATURE (658)..(658): Xaa can be any naturally occurring amino acid
  MISC_FEATURE (660)..(660): Xaa can be any naturally occurring amino acid except Pro or Gly
  MISC_FEATURE (661)..(661): Xaa can be any naturally occurring amino acid except Pro or Gly
  MISC_FEATURE (662)..(662): Xaa can be any naturally occurring amino acid except Pro or Gly
  MISC_FEATURE (664)..(664): Xaa can be any naturally occurring amino acid
  MISC_FEATURE (665)..(665): Xaa can be any naturally occurring amino acid
  MISC_FEATURE (666)..(666): Xaa can be any naturally occurring amino acid
  MISC_FEATURE (668)..(668): Xaa can be any naturally occurring amino acid except Pro or Gly
  MISC_FEATURE (669)..(669): Xaa can be any naturally occurring amino acid except Pro or Gly
  MISC_FEATURE (670)..(670): Xaa can be any naturally occurring amino acid except Pro or Gly
  MISC_FEATURE (672)..(672): Xaa can be any naturally occurring amino acid
  MISC_FEATURE (673)..(673): Xaa can be any naturally occurring amino acid
  MISC_FEATURE (674)..(674): Xaa can be any naturally occurring amino acid
  MISC_FEATURE (676)..(676): Xaa can be any naturally occurring amino acid except Pro or Gly
  MISC_FEATURE (677)..(677): Xaa can be any naturally occurring amino acid except Pro or Gly
  MISC_FEATURE (678)..(678): Xaa can be any naturally occurring amino acid except Pro or Gly
  MISC_FEATURE (680)..(680): Xaa can be any naturally occurring amino acid
  MISC_FEATURE (681)..(681): Xaa can be any naturally occurring amino acid
  MISC_FEATURE (682)..(682): Xaa can be any naturally occurring amino acid
  MISC_FEATURE (684)..(684): Xaa can be any naturally occurring amino acid except Pro or Gly
  MISC_FEATURE (685)..(685): Xaa can be any naturally occurring amino acid except Pro or Gly
  MISC_FEATURE (686)..(686): Xaa can be any naturally occurring amino acid except Pro or Gly
  MISC_FEATURE (688)..(688): Xaa can be any naturally occurring amino acid
  MISC_FEATURE (689)..(689): Xaa can be any naturally occurring amino acid
  MISC_FEATURE (690)..(690): Xaa can be any naturally occurring amino acid
  MISC_FEATURE (692)..(692): Xaa can be any naturally occurring amino acid except Pro or Gly
  MISC_FEATURE (693)..(693): Xaa can be any naturally occurring amino acid except Pro or Gly
  MISC_FEATURE (694)..(694): Xaa can be any naturally occurring amino acid except Pro or Gly
  MISC_FEATURE (696)..(696): Xaa can be any naturally occurring amino acid
  MISC_FEATURE (697)..(697): Xaa can be any naturally occurring amino acid
  MISC_FEATURE (698)..(698): Xaa can be any naturally occurring amino acid
  MISC_FEATURE (700)..(700): Xaa can be any naturally occurring amino acid except Pro or Gly
  MISC_FEATURE (701)..(701): Xaa can be any naturally occurring amino acid except Pro or Gly
  MISC_FEATURE (702)..(702): Xaa can be any naturally occurring amino acid except Pro or Gly
  MISC_FEATURE (704)..(704): Xaa can be any naturally occurring amino acid
  MISC_FEATURE (705)..(705): Xaa can be any naturally occurring amino acid
  MISC_FEATURE (706)..(706): Xaa can be any naturally occurring amino acid
  MISC_FEATURE (708)..(708): Xaa can be any naturally occurring amino acid except Pro or Gly
  MISC_FEATURE (709)..(709): Xaa can be any naturally occurring amino acid except Pro or Gly
  MISC_FEATURE (710)..(710): Xaa can be any naturally occurring amino acid except Pro or Gly
  MISC_FEATURE (712)..(712): Xaa can be any naturally occurring amino acid
  MISC_FEATURE (713)..(713): Xaa can be any naturally occurring amino acid
  MISC_FEATURE (714)..(714): Xaa can be any naturally occurring amino acid
  MISC_FEATURE (716)..(716): Xaa can be any naturally occurring amino acid except Pro or Gly
  MISC_FEATURE (717)..(717): Xaa can be any naturally occurring amino acid except Pro or Gly
  MISC_FEATURE (718)..(718): Xaa can be any naturally occurring amino acid except Pro or Gly
  MISC_FEATURE (720)..(720): Xaa can be any naturally occurring amino acid
  MISC_FEATURE (721)..(721): Xaa can be any naturally occurring amino acid
  MISC_FEATURE (722)..(722): Xaa can be any naturally occurring amino acid
  MISC_FEATURE (724)..(724): Xaa can be any naturally occurring amino acid except Pro or Gly
  MISC_FEATURE (725)..(725): Xaa can be any naturally occurring amino acid except Pro or Gly
  MISC_FEATURE (726)..(726): Xaa can be any naturally occurring amino acid except Pro or Gly
  MISC_FEATURE (728)..(728): Xaa can be any naturally occurring amino acid
  MISC_FEATURE (729)..(729): Xaa can be any naturally occurring amino acid
  MISC_FEATURE (730)..(730): Xaa can be any naturally occurring amino acid
  MISC_FEATURE (732)..(732): Xaa can be any naturally occurring amino acid except Pro or Gly
  MISC_FEATURE (733)..(733): Xaa can be any naturally occurring amino acid except Pro or Gly
  MISC_FEATURE (734)..(734): Xaa can be any naturally occurring amino acid except Pro or Gly
  MISC_FEATURE (736)..(736): Xaa can be any naturally occurring amino acid
  MISC_FEATURE (737)..(737): Xaa can be any naturally occurring amino acid
  MISC_FEATURE (738)..(738): Xaa can be any naturally occurring amino acid
  MISC_FEATURE (740)..(740): Xaa can be any naturally occurring amino acid except Pro or Gly
  MISC_FEATURE (741)..(741): Xaa can be any naturally occurring amino acid except Pro or Gly
  MISC_FEATURE (742)..(742): Xaa can be any naturally occurring amino acid except Pro or Gly
  MISC_FEATURE (744)..(744): Xaa can be any naturally occurring amino acid
  MISC_FEATURE (745)..(745): Xaa can be any naturally occurring amino acid
  MISC_FEATURE (746)..(746): Xaa can be any naturally occurring amino acid
  MISC_FEATURE (748)..(748): Xaa can be any naturally occurring amino acid except Pro or Gly
  MISC_FEATURE (749)..(749): Xaa can be any naturally occurring amino acid except Pro or Gly
  MISC_FEATURE (750)..(750): Xaa can be any naturally occurring amino acid except Pro or Gly
  MISC_FEATURE (752)..(752): Xaa can be any naturally occurring amino acid
  MISC_FEATURE (753)..(753): Xaa can be any naturally occurring amino acid
  MISC_FEATURE (754)..(754): Xaa can be any naturally occurring amino acid
  MISC_FEATURE (756)..(756): Xaa can be any naturally occurring amino acid except Pro or Gly
  MISC_FEATURE (757)..(757): Xaa can be any naturally occurring amino acid except Pro or Gly
  MISC_FEATURE (758)..(758): Xaa can be any naturally occurring amino acid except Pro or Gly
  MISC_FEATURE (760)..(760): Xaa can be any naturally occurring amino acid
  MISC_FEATURE (761)..(761): Xaa can be any naturally occurring amino acid
  MISC_FEATURE (762)..(762): Xaa can be any naturally occurring amino acid
  MISC_FEATURE (764)..(764): Xaa can be any naturally occurring amino acid except Pro or Gly
  MISC_FEATURE (765)..(765): Xaa can be any naturally occurring amino acid except Pro or Gly
  MISC_FEATURE (766)..(766): Xaa can be any naturally occurring amino acid except Pro or Gly
  MISC_FEATURE (768)..(768): Xaa can be any naturally occurring amino acid
  MISC_FEATURE (769)..(769): Xaa can be any naturally occurring amino acid
  MISC_FEATURE (770)..(770): Xaa can be any naturally occurring amino acid
  MISC_FEATURE (772)..(772): Xaa can be any naturally occurring amino acid except Pro or Gly
  MISC_FEATURE (773)..(773): Xaa can be any naturally occurring amino acid except Pro or Gly
  MISC_FEATURE (774)..(774): Xaa can be any naturally occurring amino acid except Pro or Gly
  MISC_FEATURE (776)..(776): Xaa can be any naturally occurring amino acid
  MISC_FEATURE (777)..(777): Xaa can be any naturally occurring amino acid
  MISC_FEATURE (778)..(778): Xaa can be any naturally occurring amino acid
  MISC_FEATURE (780)..(780): Xaa can be any naturally occurring amino acid except Pro or Gly
  MISC_FEATURE (781)..(781): Xaa can be any naturally occurring amino acid except Pro or Gly
  MISC_FEATURE (782)..(782): Xaa can be any naturally occurring amino acid except Pro or Gly
  MISC_FEATURE (784)..(784): Xaa can be any naturally occurring amino acid
  MISC_FEATURE (785)..(785): Xaa can be any naturally occurring amino acid
  MISC_FEATURE (786)..(786): Xaa can be any naturally occurring amino acid
  MISC_FEATURE (788)..(788): Xaa can be any naturally occurring amino acid except Pro or Gly
  MISC_FEATURE (789)..(789): Xaa can be any naturally occurring amino acid except Pro or Gly
  MISC_FEATURE (790)..(790): Xaa can be any naturally occurring amino acid except Pro or Gly
  MISC_FEATURE (792)..(792): Xaa can be any naturally occurring amino acid
  MISC_FEATURE (793)..(793): Xaa can be any naturally occurring amino acid
  MISC_FEATURE (794)..(794): Xaa can be any naturally occurring amino acid
  MISC_FEATURE (796)..(796): Xaa can be any naturally occurring amino acid except Pro or Gly
  MISC_FEATURE (797)..(797): Xaa can be any naturally occurring amino acid except Pro or Gly
  MISC_FEATURE (798)..(798): Xaa can be any naturally occurring amino acid except Pro or Gly
  MISC_FEATURE (800)..(800): Xaa can be any naturally occurring amino acid
  MISC_FEATURE (801)..(801): Xaa can be any naturally occurring amino acid
  MISC_FEATURE (802)..(802): Xaa can be any naturally occurring amino acid
  MISC_FEATURE (804)..(804): Xaa can be any naturally occurring amino acid except Pro or Gly
  MISC_FEATURE (805)..(805): Xaa can be any naturally occurring amino acid except Pro or Gly
  MISC_FEATURE (806)..(806): Xaa can be any naturally occurring amino acid except Pro or Gly
  MISC_FEATURE (808)..(808): Xaa can be any naturally occurring amino acid
  MISC_FEATURE (809)..(809): Xaa can be any naturally occurring amino acid
  MISC_FEATURE (810)..(810): Xaa can be any naturally occurring amino acid
  MISC_FEATURE (812)..(812): Xaa can be any naturally occurring amino acid except Pro or Gly
  MISC_FEATURE (813)..(813): Xaa can be any naturally occurring amino acid except Pro or Gly
  MISC_FEATURE (814)..(814): Xaa can be any naturally occurring amino acid except Pro or Gly
  MISC_FEATURE (816)..(816): Xaa can be any naturally occurring amino acid
  MISC_FEATURE (817)..(817): Xaa can be any naturally occurring amino acid
  MISC_FEATURE (818)..(818): Xaa can be any naturally occurring amino acid
  MISC_FEATURE (820)..(820): Xaa can be any naturally occurring amino acid except Pro or Gly
  MISC_FEATURE (821)..(821): Xaa can be any naturally occurring amino acid except Pro or Gly
  MISC_FEATURE (822)..(822): Xaa can be any naturally occurring amino acid except Pro or Gly
  MISC_FEATURE (824)..(824): Xaa can be any naturally occurring amino acid
  MISC_FEATURE (825)..(825): Xaa can be any naturally occurring amino acid
  MISC_FEATURE (826)..(826): Xaa can be any naturally occurring amino acid
  MISC_FEATURE (828)..(828): Xaa can be any naturally occurring amino acid except Pro or Gly
  MISC_FEATURE (829)..(829): Xaa can be any naturally occurring amino acid except Pro or Gly
  MISC_FEATURE (830)..(830): Xaa can be any naturally occurring amino acid except Pro or Gly
  MISC_FEATURE (832)..(832): Xaa can be any naturally occurring amino acid
  MISC_FEATURE (833)..(833): Xaa can be any naturally occurring amino acid
  MISC_FEATURE (834)..(834): Xaa can be any naturally occurring amino acid
  MISC_FEATURE (836)..(836): Xaa can be any naturally occurring amino acid except Pro or Gly
  MISC_FEATURE (837)..(837): Xaa can be any naturally occurring amino acid except Pro or Gly
  MISC_FEATURE (838)..(838): Xaa can be any naturally occurring amino acid except Pro or Gly
  MISC_FEATURE (840)..(840): Xaa can be any naturally occurring amino acid
  MISC_FEATURE (841)..(841): Xaa can be any naturally occurring amino acid
  MISC_FEATURE (842)..(842): Xaa can be any naturally occurring amino acid
  MISC_FEATURE (844)..(844): Xaa can be any naturally occurring amino acid except Pro or Gly
  MISC_FEATURE (845)..(845): Xaa can be any naturally occurring amino acid except Pro or Gly
  MISC_FEATURE (846)..(846): Xaa can be any naturally occurring amino acid except Pro or Gly
  MISC_FEATURE (848)..(848): Xaa can be any naturally occurring amino acid
  MISC_FEATURE (849)..(849): Xaa can be any naturally occurring amino acid
  MISC_FEATURE (850)..(850): Xaa can be any naturally occurring amino acid
  MISC_FEATURE (852)..(852): Xaa can be any naturally occurring amino acid except Pro or Gly
  MISC_FEATURE (853)..(853): Xaa can be any naturally occurring amino acid except Pro or Gly
  MISC_FEATURE (854)..(854): Xaa can be any naturally occurring amino acid except Pro or Gly
  MISC_FEATURE (856)..(856): Xaa can be any naturally occurring amino acid
  MISC_FEATURE (857)..(857): Xaa can be any naturally occurring amino acid
  MISC_FEATURE (858)..(858): Xaa can be any naturally occurring amino acid
  MISC_FEATURE (860)..(860): Xaa can be any naturally occurring amino acid except Pro or Gly
  MISC_FEATURE (861)..(861): Xaa can be any naturally occurring amino acid except Pro or Gly
  MISC_FEATURE (862)..(862): Xaa can be any naturally occurring amino acid except Pro or Gly
  MISC_FEATURE (864)..(864): Xaa can be any naturally occurring amino acid
  MISC_FEATURE (865)..(865): Xaa can be any naturally occurring amino acid
  MISC_FEATURE (866)..(866): Xaa can be any naturally occurring amino acid
  MISC_FEATURE (868)..(868): Xaa can be any naturally occurring amino acid except Pro or Gly
  MISC_FEATURE (869)..(869): Xaa can be any naturally occurring amino acid except Pro or Gly
  MISC_FEATURE (870)..(870): Xaa can be any naturally occurring amino acid except Pro or Gly
  MISC_FEATURE (872)..(872): Xaa can be any naturally occurring amino acid
  MISC_FEATURE (873)..(873): Xaa can be any naturally occurring amino acid
  MISC_FEATURE (874)..(874): Xaa can be any naturally occurring amino acid
  MISC_FEATURE (876)..(876): Xaa can be any naturally occurring amino acid except Pro or Gly
  MISC_FEATURE (877)..(877): Xaa can be any naturally occurring amino acid except Pro or Gly
  MISC_FEATURE (878)..(878): Xaa can be any naturally occurring amino acid except Pro or Gly
  MISC_FEATURE (880)..(880): Xaa can be any naturally occurring amino acid
  MISC_FEATURE (881)..(881): Xaa can be any naturally occurring amino acid
  MISC_FEATURE (882)..(882): Xaa can be any naturally occurring amino acid
  MISC_FEATURE (884)..(884): Xaa can be any naturally occurring amino acid except Pro or Gly
  MISC_FEATURE (885)..(885): Xaa can be any naturally occurring amino acid except Pro or Gly
  MISC_FEATURE (886)..(886): Xaa can be any naturally occurring amino acid except Pro or Gly
  MISC_FEATURE (888)..(888): Xaa can be any naturally occurring amino acid
  MISC_FEATURE (889)..(889): Xaa can be any naturally occurring amino acid
  MISC_FEATURE (890)..(890): Xaa can be any naturally occurring amino acid
  MISC_FEATURE (892)..(892): Xaa can be any naturally occurring amino acid except Pro or Gly
  MISC_FEATURE (893)..(893): Xaa can be any naturally occurring amino acid except Pro or Gly
  MISC_FEATURE (894)..(894): Xaa can be any naturally occurring amino acid except Pro or Gly
  MISC_FEATURE (896)..(896): Xaa can be any naturally occurring amino acid
  MISC_FEATURE (897)..(897): Xaa can be any naturally occurring amino acid
  MISC_FEATURE (898)..(898): Xaa can be any naturally occurring amino acid
  MISC_FEATURE (900)..(900): Xaa can be any naturally occurring amino acid except Pro or Gly
  MISC_FEATURE (901)..(901): Xaa can be any naturally occurring amino acid except Pro or Gly
  MISC_FEATURE (902)..(902): Xaa can be any naturally occurring amino acid except Pro or Gly
  MISC_FEATURE (904)..(904): Xaa can be any naturally occurring amino acid
  MISC_FEATURE (905)..(905): Xaa can be any naturally occurring amino acid
  MISC_FEATURE (906)..(906): Xaa can be any naturally occurring amino acid
  MISC_FEATURE (908)..(908): Xaa can be any naturally occurring amino acid except Pro or Gly
  MISC_FEATURE (909)..(909): Xaa can be any naturally occurring amino acid except Pro or Gly
  MISC_FEATURE (910)..(910): Xaa can be any naturally occurring amino acid except Pro or Gly
  MISC_FEATURE (912)..(912): Xaa can be any naturally occurring amino acid
  MISC_FEATURE (913)..(913): Xaa can be any naturally occurring amino acid
  MISC_FEATURE (914)..(914): Xaa can be any naturally occurring amino acid
  MISC_FEATURE (916)..(916): Xaa can be any naturally occurring amino acid except Pro or Gly
  MISC_FEATURE (917)..(917): Xaa can be any naturally occurring amino acid except Pro or Gly
  MISC_FEATURE (918)..(918): Xaa can be any naturally occurring amino acid except Pro or Gly
  MISC_FEATURE (920)..(920): Xaa can be any naturally occurring amino acid
  MISC_FEATURE (921)..(921): Xaa can be any naturally occurring amino acid
  MISC_FEATURE (922)..(922): Xaa can be any naturally occurring amino acid
  MISC_FEATURE (924)..(924): Xaa can be any naturally occurring amino acid except Pro or Gly
  MISC_FEATURE (925)..(925): Xaa can be any naturally occurring amino acid except Pro or Gly
  MISC_FEATURE (926)..(926): Xaa can be any naturally occurring amino acid except Pro or Gly
  MISC_FEATURE (928)..(928): Xaa can be any naturally occurring amino acid
  MISC_FEATURE (929)..(929): Xaa can be any naturally occurring amino acid
  MISC_FEATURE (930)..(930): Xaa can be any naturally occurring amino acid
  MISC_FEATURE (932)..(932): Xaa can be any naturally occurring amino acid except Pro or Gly
  MISC_FEATURE (933)..(933): Xaa can be any naturally occurring amino acid except Pro or Gly
  MISC_FEATURE (934)..(934): Xaa can be any naturally occurring amino acid except Pro or Gly
  MISC_FEATURE (936)..(936): Xaa can be any naturally occurring amino acid
  MISC_FEATURE (937)..(937): Xaa can be any naturally occurring amino acid
  MISC_FEATURE (938)..(938): Xaa can be any naturally occurring amino acid
  MISC_FEATURE (940)..(940): Xaa can be any naturally occurring amino acid except Pro or Gly
  MISC_FEATURE (941)..(941): Xaa can be any naturally occurring amino acid except Pro or Gly
  MISC_FEATURE (942)..(942): Xaa can be any naturally occurring amino acid except Pro or Gly
  MISC_FEATURE (944)..(944): Xaa can be any naturally occurring amino acid
  MISC_FEATURE (945)..(945): Xaa can be any naturally occurring amino acid
  MISC_FEATURE (946)..(946): Xaa can be any naturally occurring amino acid
  MISC_FEATURE (948)..(948): Xaa can be any naturally occurring amino acid except Pro or Gly
  MISC_FEATURE (949)..(949): Xaa can be any naturally occurring amino acid except Pro or Gly
  MISC_FEATURE (950)..(950): Xaa can be any naturally occurring amino acid except Pro or Gly
  MISC_FEATURE (952)..(952): Xaa can be any naturally occurring amino acid
  MISC_FEATURE (953)..(953): Xaa can be any naturally occurring amino acid
  MISC_FEATURE (954)..(954): Xaa can be any naturally occurring amino acid
  MISC_FEATURE (956)..(956): Xaa can be any naturally occurring amino acid except Pro or Gly
  MISC_FEATURE (957)..(957): Xaa can be any naturally occurring amino acid except Pro or Gly
  MISC_FEATURE (958)..(958): Xaa can be any naturally occurring amino acid except Pro or Gly
  MISC_FEATURE (960)..(960): Xaa can be any naturally occurring amino acid
  MISC_FEATURE (961)..(961): Xaa can be any naturally occurring amino acid
  MISC_FEATURE (962)..(962): Xaa can be any naturally occurring amino acid
  MISC_FEATURE (964)..(964): Xaa can be any naturally occurring amino acid except Pro or Gly
  MISC_FEATURE (965)..(965): Xaa can be any naturally occurring amino acid except Pro or Gly
  MISC_FEATURE (966)..(966): Xaa can be any naturally occurring amino acid except Pro or Gly
  MISC_FEATURE (968)..(968): Xaa can be any naturally occurring amino acid
  MISC_FEATURE (969)..(969): Xaa can be any naturally occurring amino acid
  MISC_FEATURE (970)..(970): Xaa can be any naturally occurring amino acid
  MISC_FEATURE (972)..(972): Xaa can be any naturally occurring amino acid except Pro or Gly
  MISC_FEATURE (973)..(973): Xaa can be any naturally occurring amino acid except Pro or Gly
  MISC_FEATURE (974)..(974): Xaa can be any naturally occurring amino acid except Pro or Gly
  MISC_FEATURE (976)..(976): Xaa can be any naturally occurring amino acid
  MISC_FEATURE (977)..(977): Xaa can be any naturally occurring amino acid
  MISC_FEATURE (978)..(978): Xaa can be any naturally occurring amino acid
  MISC_FEATURE (980)..(980): Xaa can be any naturally occurring amino acid except Pro or Gly
  MISC_FEATURE (981)..(981): Xaa can be any naturally occurring amino acid except Pro or Gly
  MISC_FEATURE (982)..(982): Xaa can be any naturally occurring amino acid except Pro or Gly
  MISC_FEATURE (984)..(984): Xaa can be any naturally occurring amino acid
  MISC_FEATURE (985)..(985): Xaa can be any naturally occurring amino acid
  MISC_FEATURE (986)..(986): Xaa can be any naturally occurring amino acid
  MISC_FEATURE (988)..(988): Xaa can be any naturally occurring amino acid except Pro or Gly
  MISC_FEATURE (989)..(989): Xaa can be any naturally occurring amino acid except Pro or Gly
  MISC_FEATURE (990)..(990): Xaa can be any naturally occurring amino acid except Pro or Gly
  MISC_FEATURE (992)..(992): Xaa can be any naturally occurring amino acid
  MISC_FEATURE (993)..(993): Xaa can be any naturally occurring amino acid
  MISC_FEATURE (994)..(994): Xaa can be any naturally occurring amino acid
  MISC_FEATURE (996)..(996): Xaa can be any naturally occurring amino acid except Pro or Gly
  MISC_FEATURE (997)..(997): Xaa can be any naturally occurring amino acid except Pro or Gly
  MISC_FEATURE (998)..(998): Xaa can be any naturally occurring amino acid except Pro or Gly
  MISC_FEATURE (1000)..(1000): Xaa can be any naturally occurring amino acid
  MISC_FEATURE (1001)..(1001): Xaa can be any naturally occurring amino acid
  MISC_FEATURE (1002)..(1002): Xaa can be any naturally occurring amino acid
  MISC_FEATURE (1004)..(1004): Xaa can be any naturally occurring amino acid except Pro or Gly
  MISC_FEATURE (1005)..(1005): Xaa can be any naturally occurring amino acid except Pro or Gly
  MISC_FEATURE (1006)..(1006): Xaa can be any naturally occurring amino acid except Pro or Gly
  MISC_FEATURE (1008)..(1008): Xaa can be any naturally occurring amino acid
  MISC_FEATURE (1009)..(1009): Xaa can be any naturally occurring amino acid
  MISC_FEATURE (1010)..(1010): Xaa can be any naturally occurring amino acid
  MISC_FEATURE (1012)..(1012): Xaa can be any naturally occurring amino acid except Pro or Gly
  MISC_FEATURE (1013)..(1013): Xaa can be any naturally occurring amino acid except Pro or Gly
  MISC_FEATURE (1014)..(1014): Xaa can be any naturally occurring amino acid except Pro or Gly
  MISC_FEATURE (1016)..(1016): Xaa can be any naturally occurring amino acid
  MISC_FEATURE (1017)..(1017): Xaa can be any naturally occurring amino acid
  MISC_FEATURE (1018)..(1018): Xaa can be any naturally occurring amino acid
  MISC_FEATURE (1020)..(1020): Xaa can be any naturally occurring amino acid except Pro or Gly
  MISC_FEATURE (1021)..(1021): Xaa can be any naturally occurring amino acid except Pro or Gly
  MISC_FEATURE (1022)..(1022): Xaa can be any naturally occurring amino acid except Pro or Gly
  MISC_FEATURE (1024)..(1024): Xaa can be any naturally occurring amino acid
  MISC_FEATURE (1025)..(1025): Xaa can be any naturally occurring amino acid
  MISC_FEATURE (1026)..(1026): Xaa can be any naturally occurring amino acid
  MISC_FEATURE (1028)..(1028): Xaa can be any naturally occurring amino acid except Pro or Gly
  MISC_FEATURE (1029)..(1029): Xaa can be any naturally occurring amino acid except Pro or Gly
  MISC_FEATURE (1030)..(1030): Xaa can be any naturally occurring amino acid except Pro or Gly
  MISC_FEATURE (1032)..(1032): Xaa can be any naturally occurring amino acid
  MISC_FEATURE (1033)..(1033): Xaa can be any naturally occurring amino acid
  MISC_FEATURE (1034)..(1034): Xaa can be any naturally occurring amino acid
  MISC_FEATURE (1036)..(1036): Xaa can be any naturally occurring amino acid except Pro or Gly
  MISC_FEATURE (1037)..(1037): Xaa can be any naturally occurring amino acid except Pro or Gly
  MISC_FEATURE (1038)..(1038): Xaa can be any naturally occurring amino acid except Pro or Gly
  MISC_FEATURE (1040)..(1040): Xaa can be any naturally occurring amino acid
  MISC_FEATURE (1041)..(1041): Xaa can be any naturally occurring amino acid
  MISC_FEATURE (1042)..(1042): Xaa can be any naturally occurring amino acid
  MISC_FEATURE (1044)..(1044): Xaa can be any naturally occurring amino acid except Pro or Gly
  MISC_FEATURE (1045)..(1045): Xaa can be any naturally occurring amino acid except Pro or Gly
  MISC_FEATURE (1046)..(1046): Xaa can be any naturally occurring amino acid except Pro or Gly
  MISC_FEATURE (1048)..(1048): Xaa can be any naturally occurring amino acid
  MISC_FEATURE (1049)..(1049): Xaa can be any naturally occurring amino acid
  MISC_FEATURE (1050)..(1050): Xaa can be any naturally occurring amino acid
  MISC_FEATURE (1052)..(1052): Xaa can be any naturally occurring amino acid except Pro or Gly
  MISC_FEATURE (1053)..(1053): Xaa can be any naturally occurring amino acid except Pro or Gly
  MISC_FEATURE (1054)..(1054): Xaa can be any naturally occurring amino acid except Pro or Gly
  MISC_FEATURE (1056)..(1056): Xaa can be any naturally occurring amino acid
  MISC_FEATURE (1057)..(1057): Xaa can be any naturally occurring amino acid
  MISC_FEATURE (1058)..(1058): Xaa can be any naturally occurring amino acid
  MISC_FEATURE (1060)..(1060): Xaa can be any naturally occurring amino acid except Pro or Gly
  MISC_FEATURE (1061)..(1061): Xaa can be any naturally occurring amino acid except Pro or Gly
  MISC_FEATURE (1062)..(1062): Xaa can be any naturally occurring amino acid except Pro or Gly
  MISC_FEATURE (1064)..(1064): Xaa can be any naturally occurring amino acid
  MISC_FEATURE (1065)..(1065): Xaa can be any naturally occurring amino acid
  MISC_FEATURE (1066)..(1066): Xaa can be any naturally occurring amino acid
  MISC_FEATURE (1068)..(1068): Xaa can be any naturally occurring amino acid except Pro or Gly
  MISC_FEATURE (1069)..(1069): Xaa can be any naturally occurring amino acid except Pro or Gly
  MISC_FEATURE (1070)..(1070): Xaa can be any naturally occurring amino acid except Pro or Gly
  MISC_FEATURE (1072)..(1072): Xaa can be any naturally occurring amino acid
  MISC_FEATURE (1073)..(1073): Xaa can be any naturally occurring amino acid
  MISC_FEATURE (1074)..(1074): Xaa can be any naturally occurring amino acid
  MISC_FEATURE (1076)..(1076): Xaa can be any naturally occurring amino acid except Pro or Gly
  MISC_FEATURE (1077)..(1077): Xaa can be any naturally occurring amino acid except Pro or Gly
  MISC_FEATURE (1078)..(1078): Xaa can be any naturally occurring amino acid except Pro or Gly
  MISC_FEATURE (1080)..(1080): Xaa can be any naturally occurring amino acid
  MISC_FEATURE (1081)..(1081): Xaa can be any naturally occurring amino acid
  MISC_FEATURE (1082)..(1082): Xaa can be any naturally occurring amino acid
  MISC_FEATURE (1084)..(1084): Xaa can be any naturally occurring amino acid except Pro or Gly
  MISC_FEATURE (1085)..(1085): Xaa can be any naturally occurring amino acid except Pro or Gly
  MISC_FEATURE (1086)..(1086): Xaa can be any naturally occurring amino acid except Pro or Gly
  MISC_FEATURE (1088)..(1088): Xaa can be any naturally occurring amino acid
  MISC_FEATURE (1089)..(1089): Xaa can be any naturally occurring amino acid
  MISC_FEATURE (1090)..(1090): Xaa can be any naturally occurring amino acid
  MISC_FEATURE (1092)..(1092): Xaa can be any naturally occurring amino acid except Pro or Gly
  MISC_FEATURE (1093)..(1093): Xaa can be any naturally occurring amino acid except Pro or Gly
  MISC_FEATURE (1094)..(1094): Xaa can be any naturally occurring amino acid except Pro or Gly
  MISC_FEATURE (1096)..(1096): Xaa can be any naturally occurring amino acid
  MISC_FEATURE (1097)..(1097): Xaa can be any naturally occurring amino acid
  MISC_FEATURE (1098)..(1098): Xaa can be any naturally occurring amino acid
  MISC_FEATURE (1100)..(1100): Xaa can be any naturally occurring amino acid except Pro or Gly
  MISC_FEATURE (1101)..(1101): Xaa can be any naturally occurring amino acid except Pro or Gly
  MISC_FEATURE (1102)..(1102): Xaa can be any naturally occurring amino acid except Pro or Gly
  MISC_FEATURE (1104)..(1104): Xaa can be any naturally occurring amino acid
  MISC_FEATURE (1105)..(1105): Xaa can be any naturally occurring amino acid
  MISC_FEATURE (1106)..(1106): Xaa can be any naturally occurring amino acid
  MISC_FEATURE (1108)..(1108): Xaa can be any naturally occurring amino acid except Pro or Gly
  MISC_FEATURE (1109)..(1109): Xaa can be any naturally occurring amino acid except Pro or Gly
  MISC_FEATURE (1110)..(1110): Xaa can be any naturally occurring amino acid except Pro or Gly
  MISC_FEATURE (1112)..(1112): Xaa can be any naturally occurring amino acid
  MISC_FEATURE (1113)..(1113): Xaa can be any naturally occurring amino acid
  MISC_FEATURE (1114)..(1114): Xaa can be any naturally occurring amino acid
  MISC_FEATURE (1116)..(1116): Xaa can be any naturally occurring amino acid except Pro or Gly
  MISC_FEATURE (1117)..(1117): Xaa can be any naturally occurring amino acid except Pro or Gly
  MISC_FEATURE (1118)..(1118): Xaa can be any naturally occurring amino acid except Pro or Gly
  MISC_FEATURE (1120)..(1120): Xaa can be any naturally occurring amino acid
  MISC_FEATURE (1121)..(1121): Xaa can be any naturally occurring amino acid
  MISC_FEATURE (1122)..(1122): Xaa can be any naturally occurring amino acid
  MISC_FEATURE (1124)..(1124): Xaa can be any naturally occurring amino acid except Pro or Gly
  MISC_FEATURE (1125)..(1125): Xaa can be any naturally occurring amino acid except Pro or Gly
  MISC_FEATURE (1126)..(1126): Xaa can be any naturally occurring amino acid except Pro or Gly
  MISC_FEATURE (1128)..(1128): Xaa can be any naturally occurring amino acid
  MISC_FEATURE (1129)..(1129): Xaa can be any naturally occurring amino acid
  MISC_FEATURE (1130)..(1130): Xaa can be any naturally occurring amino acid
  MISC_FEATURE (1132)..(1132): Xaa can be any naturally occurring amino acid except Pro or Gly
  MISC_FEATURE (1133)..(1133): Xaa can be any naturally occurring amino acid except Pro or Gly
  MISC_FEATURE (1134)..(1134): Xaa can be any naturally occurring amino acid except Pro or Gly
  MISC_FEATURE (1136)..(1136): Xaa can be any naturally occurring amino acid
  MISC_FEATURE (1137)..(1137): Xaa can be any naturally occurring amino acid
  MISC_FEATURE (1138)..(1138): Xaa can be any naturally occurring amino acid
  MISC_FEATURE (1140)..(1140): Xaa can be any naturally occurring amino acid except Pro or Gly
  MISC_FEATURE (1141)..(1141): Xaa can be any naturally occurring amino acid except Pro or Gly
  MISC_FEATURE (1142)..(1142): Xaa can be any naturally occurring amino acid except Pro or Gly
  MISC_FEATURE (1144)..(1144): Xaa can be any naturally occurring amino acid
  MISC_FEATURE (1145)..(1145): Xaa can be any naturally occurring amino acid
  MISC_FEATURE (1146)..(1146): Xaa can be any naturally occurring amino acid
  MISC_FEATURE (1148)..(1148): Xaa can be any naturally occurring amino acid except Pro or Gly
  MISC_FEATURE (1149)..(1149): Xaa can be any naturally occurring amino acid except Pro or Gly
  MISC_FEATURE (1150)..(1150): Xaa can be any naturally occurring amino acid except Pro or Gly
  MISC_FEATURE (1152)..(1152): Xaa can be any naturally occurring amino acid
  MISC_FEATURE (1153)..(1153): Xaa can be any naturally occurring amino acid
  MISC_FEATURE (1154)..(1154): Xaa can be any naturally occurring amino acid
  MISC_FEATURE (1156)..(1156): Xaa can be any naturally occurring amino acid except Pro or Gly
  MISC_FEATURE (1157)..(1157): Xaa can be any naturally occurring amino acid except Pro or Gly
  MISC_FEATURE (1158)..(1158): Xaa can be any naturally occurring amino acid except Pro or Gly
  MISC_FEATURE (1160)..(1160): Xaa can be any naturally occurring amino acid
  MISC_FEATURE (1161)..(1161): Xaa can be any naturally occurring amino acid
  MISC_FEATURE (1162)..(1162): Xaa can be any naturally occurring amino acid
  MISC_FEATURE (1164)..(1164): Xaa can be any naturally occurring amino acid except Pro or Gly
  MISC_FEATURE (1165)..(1165): Xaa can be any naturally occurring amino acid except Pro or Gly
  MISC_FEATURE (1166)..(1166): Xaa can be any naturally occurring amino acid except Pro or Gly
  MISC_FEATURE (1168)..(1168): Xaa can be any naturally occurring amino acid
  MISC_FEATURE (1169)..(1169): Xaa can be any naturally occurring amino acid
  MISC_FEATURE (1170)..(1170): Xaa can be any naturally occurring amino acid
  MISC_FEATURE (1172)..(1172): Xaa can be any naturally occurring amino acid except Pro or Gly
  MISC_FEATURE (1173)..(1173): Xaa can be any naturally occurring amino acid except Pro or Gly
  MISC_FEATURE (1174)..(1174): Xaa can be any naturally occurring amino acid except Pro or Gly
  MISC_FEATURE (1176)..(1176): Xaa can be any naturally occurring amino acid
  MISC_FEATURE (1177)..(1177): Xaa can be any naturally occurring amino acid
  MISC_FEATURE (1178)..(1178): Xaa can be any naturally occurring amino acid
  MISC_FEATURE (1180)..(1180): Xaa can be any naturally occurring amino acid except Pro or Gly
  MISC_FEATURE (1181)..(1181): Xaa can be any naturally occurring amino acid except Pro or Gly
  MISC_FEATURE (1182)..(1182): Xaa can be any naturally occurring amino acid except Pro or Gly
  MISC_FEATURE (1184)..(1184): Xaa can be any naturally occurring amino acid
  MISC_FEATURE (1185)..(1185): Xaa can be any naturally occurring amino acid
  MISC_FEATURE (1186)..(1186): Xaa can be any naturally occurring amino acid
  MISC_FEATURE (1188)..(1188): Xaa can be any naturally occurring amino acid except Pro or Gly
  MISC_FEATURE (1189)..(1189): Xaa can be any naturally occurring amino acid except Pro or Gly
  MISC_FEATURE (1190)..(1190): Xaa can be any naturally occurring amino acid except Pro or Gly
  MISC_FEATURE (1192)..(1192): Xaa can be any naturally occurring amino acid
  MISC_FEATURE (1193)..(1193): Xaa can be any naturally occurring amino acid
  MISC_FEATURE (1194)..(1194): Xaa can be any naturally occurring amino acid
  MISC_FEATURE (1196)..(1196): Xaa can be any naturally occurring amino acid except Pro or Gly
  MISC_FEATURE (1197)..(1197): Xaa can be any naturally occurring amino acid except Pro or Gly
  MISC_FEATURE (1198)..(1198): Xaa can be any naturally occurring amino acid except Pro or Gly
  MISC_FEATURE (1200)..(1200): Xaa can be any naturally occurring amino acid
  MISC_FEATURE (1201)..(1201): Xaa can be any naturally occurring amino acid
  MISC_FEATURE (1202)..(1202): Xaa can be any naturally occurring amino acid
  MISC_FEATURE (1204)..(1204): Xaa can be any naturally occurring amino acid except Pro or Gly
  MISC_FEATURE (1205)..(1205): Xaa can be any naturally occurring amino acid except Pro or Gly
  MISC_FEATURE (1206)..(1206): Xaa can be any naturally occurring amino acid except Pro or Gly
  MISC_FEATURE (1208)..(1208): Xaa can be any naturally occurring amino acid
  MISC_FEATURE (1209)..(1209): Xaa can be any naturally occurring amino acid
  MISC_FEATURE (1210)..(1210): Xaa can be any naturally occurring amino acid
  MISC_FEATURE (1212)..(1212): Xaa can be any naturally occurring amino acid except Pro or Gly
  MISC_FEATURE (1213)..(1213): Xaa can be any naturally occurring amino acid except Pro or Gly
  MISC_FEATURE (1214)..(1214): Xaa can be any naturally occurring amino acid except Pro or Gly
  MISC_FEATURE (1216)..(1216): Xaa can be any naturally occurring amino acid
  MISC_FEATURE (1217)..(1217): Xaa can be any naturally occurring amino acid
  MISC_FEATURE (1218)..(1218): Xaa can be any naturally occurring amino acid
  MISC_FEATURE (1220)..(1220): Xaa can be any naturally occurring amino acid except Pro or Gly
  MISC_FEATURE (1221)..(1221): Xaa can be any naturally occurring amino acid except Pro or Gly
  MISC_FEATURE (1222)..(1222): Xaa can be any naturally occurring amino acid except Pro or Gly
  MISC_FEATURE (1224)..(1224): Xaa can be any naturally occurring amino acid
  MISC_FEATURE (1225)..(1225): Xaa can be any naturally occurring amino acid
  MISC_FEATURE (1226)..(1226): Xaa can be any naturally occurring amino acid
  MISC_FEATURE (1228)..(1228): Xaa can be any naturally occurring amino acid except Pro or Gly
  MISC_FEATURE (1229)..(1229): Xaa can be any naturally occurring amino acid except Pro or Gly
  MISC_FEATURE (1230)..(1230): Xaa can be any naturally occurring amino acid except Pro or Gly
  MISC_FEATURE (1232)..(1232): Xaa can be any naturally occurring amino acid
  MISC_FEATURE (1233)..(1233): Xaa can be any naturally occurring amino acid
  MISC_FEATURE (1234)..(1234): Xaa can be any naturally occurring amino acid
  MISC_FEATURE (1236)..(1236): Xaa can be any naturally occurring amino acid except Pro or Gly
  MISC_FEATURE (1237)..(1237): Xaa can be any naturally occurring amino acid except Pro or Gly
  MISC_FEATURE (1238)..(1238): Xaa can be any naturally occurring amino acid except Pro or Gly
  MISC_FEATURE (1240)..(1240): Xaa can be any naturally occurring amino acid
  MISC_FEATURE (1241)..(1241): Xaa can be any naturally occurring amino acid
  MISC_FEATURE (1242)..(1242): Xaa can be any naturally occurring amino acid
  MISC_FEATURE (1244)..(1244): Xaa can be any naturally occurring amino acid except Pro or Gly
  MISC_FEATURE (1245)..(1245): Xaa can be any naturally occurring amino acid except Pro or Gly
  MISC_FEATURE (1246)..(1246): Xaa can be any naturally occurring amino acid except Pro or Gly
  MISC_FEATURE (1248)..(1248): Xaa can be any naturally occurring amino acid
  MISC_FEATURE (1249)..(1249): Xaa can be any naturally occurring amino acid
  MISC_FEATURE (1250)..(1250): Xaa can be any naturally occurring amino acid
  MISC_FEATURE (1252)..(1252): Xaa can be any naturally occurring amino acid except Pro or Gly
  MISC_FEATURE (1253)..(1253): Xaa can be any naturally occurring amino acid except Pro or Gly
  MISC_FEATURE (1254)..(1254): Xaa can be any naturally occurring amino acid except Pro or Gly
  MISC_FEATURE (1256)..(1256): Xaa can be any naturally occurring amino acid
  MISC_FEATURE (1257)..(1257): Xaa can be any naturally occurring amino acid
  MISC_FEATURE (1258)..(1258): Xaa can be any naturally occurring amino acid
  MISC_FEATURE (1260)..(1260): Xaa can be any naturally occurring amino acid except Pro or Gly
  MISC_FEATURE (1261)..(1261): Xaa can be any naturally occurring amino acid except Pro or Gly
  MISC_FEATURE (1262)..(1262): Xaa can be any naturally occurring amino acid except Pro or Gly
  MISC_FEATURE (1264)..(1264): Xaa can be any naturally occurring amino acid
  MISC_FEATURE (1265)..(1265): Xaa can be any naturally occurring amino acid
  MISC_FEATURE (1266)..(1266): Xaa can be any naturally occurring amino acid
  MISC_FEATURE (1268)..(1268): Xaa can be any naturally occurring amino acid except Pro or Gly
  MISC_FEATURE (1269)..(1269): Xaa can be any naturally occurring amino acid except Pro or Gly
  MISC_FEATURE (1270)..(1270): Xaa can be any naturally occurring amino acid except Pro or Gly
  MISC_FEATURE (1272)..(1272): Xaa can be any naturally occurring amino acid
  MISC_FEATURE (1273)..(1273): Xaa can be any naturally occurring amino acid
  MISC_FEATURE (1274)..(1274): Xaa can be any naturally occurring amino acid
  MISC_FEATURE (1276)..(1276): Xaa can be any naturally occurring amino acid except Pro or Gly
  MISC_FEATURE (1277)..(1277): Xaa can be any naturally occurring amino acid except Pro or Gly
  MISC_FEATURE (1278)..(1278): Xaa can be any naturally occurring amino acid except Pro or Gly
  MISC_FEATURE (1280)..(1280): Xaa can be any naturally occurring amino acid
XXPXXXGXXXPXXXGXXXPXXXGXXXPXXXGXXXPXXXGXXXPXXXGXXXPXXXGXXXPXXXGXXXPXXXGXXXPXXXGXXXPXXXGXXXPXXXGXXXPXXXGXXXPXXXGXXXPXXXGXXXPXXXGXXXPXXXGXXXPXXXGXXXPXXXGXXXPXXXGXXXPXXXGXXXPXXXGXXXPXXXGXXXPXXXGXXXPXXXGXXXPXXXGXXXPXXXGXXXPXXXGXXXPXXXGXXXPXXXGXXXPXXXGXXXPXXXGXXXPXXXGXXXPXXXGXXXPXXXGXXXPXXXGXXXPXXXGXXXPXXXGXXXPXXXGXXXPXXXGXXXPXXXGXXXPXXXGXXXPXXXGXXXPXXXGXXXPXXXGXXXPXXXGXXXPXXXGXXXPXXXGXXXPXXXGXXXPXXXGXXXPXXXGXXXPXXXGXXXPXXXGXXXPXXXGXXXPXXXGXXXPXXXGXXXPXXXGXXXPXXXGXXXPXXXGXXXPXXXGXXXPXXXGXXXPXXXGXXXPXXXGXXXPXXXGXXXPXXXGXXXPXXXGXXXPXXXGXXXPXXXGXXXPXXXGXXXPXXXGXXXPXXXGXXXPXXXGXXXPXXXGXXXPXXXGXXXPXXXGXXXPXXXGXXXPXXXGXXXPXXXGXXXPXXXGXXXPXXXGXXXPXXXGXXXPXXXGXXXPXXXGXXXPXXXGXXXPXXXGXXXPXXXGXXXPXXXGXXXPXXXGXXXPXXXGXXXPXXXGXXXPXXXGXXXPXXXGXXXPXXXGXXXPXXXGXXXPXXXGXXXPXXXGXXXPXXXGXXXPXXXGXXXPXXXGXXXPXXXGXXXPXXXGXXXPXXXGXXXPXXXGXXXPXXXGXXXPXXXGXXXPXXXGXXXPXXXGXXXPXXXGXXXPXXXGXXXPXXXGXXXPXXXGXXXPXXXGXXXPXXXGXXXPXXXGXXXPXXXGXXXPXXXGXXXPXXXGXXXPXXXGXXXPXXXGXXXPXXXGXXXPXXXGXXXPXXXGXXXPXXXGXXXPXXXGXXXPXXXGXXXPXXXGXXXPXXXGXXXPXXXGXXXPXXXGXXXPXXXGXXXPXXXGXXXPXXXGXXXPXXXGXXXPXXXGXXXPXXXGXXXPXXXGXXXPXXXGXXXPXXXGXXXPXXXGXXXPXXXGXXXPXXXGXXXPXXXGXXXPXXXGXXXPXXXGXXXPXXXGXXXPXXXGXXXPXXXGXXXPXXXGXXXPXXXGXXXPXXXGXXXPXXXGXXXPXXXGXXXPXXXGXXXPXXXGXXXPXXXGXXXPXXXGXXXPXXXGXXXPXXXGXXXPXXXGXXXPXXXGX

SEQ ID NO: 60 - protein, 1280 aa, Artificial Sequence
  elastin-like polypeptide
  MISC_FEATURE (5)..(5): Xaa is Gln or Ser
  MISC_FEATURE (7)..(7): Xaa is Tyr or Val
  MISC_FEATURE (8)..(8): Xaa is Gln or Ser
  MISC_FEATURE (13)..(13): Xaa is Gln or Ser
  MISC_FEATURE (15)..(15): Xaa is Tyr or Val
  MISC_FEATURE (16)..(16): Xaa is Gln or Ser
  MISC_FEATURE (21)..(21): Xaa is Gln or Ser
  MISC_FEATURE (23)..(23): Xaa is Tyr or Val
  MISC_FEATURE (24)..(24): Xaa is Gln or Ser
  MISC_FEATURE (29)..(29): Xaa is Gln or Ser
  MISC_FEATURE (31)..(31): Xaa is Tyr or Val
  MISC_FEATURE (32)..(32): Xaa is Gln or Ser
  MISC_FEATURE (37)..(37): Xaa is Gln or Ser
  MISC_FEATURE (39)..(39): Xaa is Tyr or Val
  MISC_FEATURE (40)..(40): Xaa is Gln or Ser
  MISC_FEATURE (45)..(45): Xaa is Gln or Ser
  MISC_FEATURE (47)..(47): Xaa is Tyr or Val
  MISC_FEATURE (48)..(48): Xaa is Gln or Ser
  MISC_FEATURE (53)..(53): Xaa is Gln or Ser
  MISC_FEATURE (55)..(55): Xaa is Tyr or Val
  MISC_FEATURE (56)..(56): Xaa is Gln or Ser
  MISC_FEATURE (61)..(61): Xaa is Gln or Ser
  MISC_FEATURE (63)..(63): Xaa is Tyr or Val
  MISC_FEATURE (64)..(64): Xaa is Gln or Ser
  MISC_FEATURE (69)..(69): Xaa is Gln or Ser
  MISC_FEATURE (71)..(71): Xaa is Tyr or Val
  MISC_FEATURE (72)..(72): Xaa is Gln or Ser
  MISC_FEATURE (77)..(77): Xaa is Gln or Ser
  MISC_FEATURE (79)..(79): Xaa is Tyr or Val
  MISC_FEATURE (80)..(80): Xaa is Gln or Ser
  MISC_FEATURE (81)..(1280): May be present or absent in groups of the repeat unit Gly Arg Gly Asp Xaa Pro Xaa Xaa
  MISC_FEATURE (85)..(85): Xaa is Gln or Ser
  MISC_FEATURE (87)..(87): Xaa is Tyr or Val
  MISC_FEATURE (88)..(88): Xaa is Gln or Ser
  MISC_FEATURE (93)..(93): Xaa is Gln or Ser
  MISC_FEATURE (95)..(95): Xaa is Tyr or Val
  MISC_FEATURE (96)..(96): Xaa is Gln or Ser
  MISC_FEATURE (101)..(101): Xaa is Gln or Ser
  MISC_FEATURE (103)..(103): Xaa is Tyr or Val
  MISC_FEATURE (104)..(104): Xaa is Gln or Ser
  MISC_FEATURE (109)..(109): Xaa is Gln or Ser
  MISC_FEATURE (111)..(111): Xaa is Tyr or Val
  MISC_FEATURE (112)..(112): Xaa is Gln or Ser
  MISC_FEATURE (117)..(117): Xaa is Gln or Ser
  MISC_FEATURE (119)..(119): Xaa is Tyr or Val
  MISC_FEATURE (120)..(120): Xaa is Gln or Ser
  MISC_FEATURE (125)..(125): Xaa is Gln or Ser
  MISC_FEATURE (127)..(127): Xaa is Tyr or Val
  MISC_FEATURE (128)..(128): Xaa is Gln or Ser
  MISC_FEATURE (133)..(133): Xaa is Gln or Ser
  MISC_FEATURE (135)..(135): Xaa is Tyr or Val
  MISC_FEATURE (136)..(136): Xaa is Gln or Ser
  MISC_FEATURE (141)..(141): Xaa is Gln or Ser
  MISC_FEATURE (143)..(143): Xaa is Tyr or Val
  MISC_FEATURE (144)..(144): Xaa is Gln or Ser
  MISC_FEATURE (149)..(149): Xaa is Gln or Ser
  MISC_FEATURE (151)..(151): Xaa is Tyr or Val
  MISC_FEATURE (152)..(152): Xaa is Gln or Ser
  MISC_FEATURE (157)..(157): Xaa is Gln or Ser
  MISC_FEATURE (159)..(159): Xaa is Tyr or Val
  MISC_FEATURE (160)..(160): Xaa is Gln or Ser
  MISC_FEATURE (165)..(165): Xaa is Gln or Ser
  MISC_FEATURE (167)..(167): Xaa is Tyr or Val
  MISC_FEATURE (168)..(168): Xaa is Gln or Ser
  MISC_FEATURE (173)..(173): Xaa is Gln or Ser
  MISC_FEATURE (175)..(175): Xaa is Tyr or Val
  MISC_FEATURE (176)..(176): Xaa is Gln or Ser
  MISC_FEATURE (181)..(181): Xaa is Gln or Ser
  MISC_FEATURE (183)..(183): Xaa is Tyr or Val
  MISC_FEATURE (184)..(184): Xaa is Gln or Ser
  MISC_FEATURE (189)..(189): Xaa is Gln or Ser
  MISC_FEATURE (191)..(191): Xaa is Tyr or Val
  MISC_FEATURE (192)..(192): Xaa is Gln or Ser
  MISC_FEATURE (197)..(197): Xaa is Gln or Ser
  MISC_FEATURE (199)..(199): Xaa is Tyr or Val
  MISC_FEATURE (200)..(200): Xaa is Gln or Ser
  MISC_FEATURE (205)..(205): Xaa is Gln or Ser
  MISC_FEATURE (207)..(207): Xaa is Tyr or Val
  MISC_FEATURE (208)..(208): Xaa is Gln or Ser
  MISC_FEATURE (213)..(213): Xaa is Gln or Ser
  MISC_FEATURE (215)..(215): Xaa is Tyr or Val
  MISC_FEATURE (216)..(216): Xaa is Gln or Ser
  MISC_FEATURE (221)..(221): Xaa is Gln or Ser
  MISC_FEATURE (223)..(223): Xaa is Tyr or Val
  MISC_FEATURE (224)..(224): Xaa is Gln or Ser
  MISC_FEATURE (229)..(229): Xaa is Gln or Ser
  MISC_FEATURE (231)..(231): Xaa is Tyr or Val
  MISC_FEATURE (232)..(232): Xaa is Gln or Ser
  MISC_FEATURE (237)..(237): Xaa is Gln or Ser
  MISC_FEATURE (239)..(239): Xaa is Tyr or Val
  MISC_FEATURE (240)..(240): Xaa is Gln or Ser
  MISC_FEATURE (245)..(245): Xaa is Gln or Ser
  MISC_FEATURE (247)..(247): Xaa is Tyr or Val
  MISC_FEATURE (248)..(248): Xaa is Gln or Ser
  MISC_FEATURE (253)..(253): Xaa is Gln or Ser
  MISC_FEATURE (255)..(255): Xaa is Tyr or Val
  MISC_FEATURE (256)..(256): Xaa is Gln or Ser
  MISC_FEATURE (261)..(261): Xaa is Gln or Ser
  MISC_FEATURE (263)..(263): Xaa is Tyr or Val
  MISC_FEATURE (264)..(264): Xaa is Gln or Ser
  MISC_FEATURE (269)..(269): Xaa is Gln or Ser
  MISC_FEATURE (271)..(271): Xaa is Tyr or Val
  MISC_FEATURE (272)..(272): Xaa is Gln or Ser
  MISC_FEATURE (277)..(277): Xaa is Gln or Ser
  MISC_FEATURE (279)..(279): Xaa is Tyr or Val
  MISC_FEATURE (280)..(280): Xaa is Gln or Ser
  MISC_FEATURE (285)..(285): Xaa is Gln or Ser
  MISC_FEATURE (287)..(287): Xaa is Tyr or Val
  MISC_FEATURE (288)..(288): Xaa is Gln or Ser
  MISC_FEATURE (293)..(293): Xaa is Gln or Ser
  MISC_FEATURE (295)..(295): Xaa is Tyr or Val
  MISC_FEATURE (296)..(296): Xaa is Gln or Ser
  MISC_FEATURE (301)..(301): Xaa is Gln or Ser
  MISC_FEATURE (303)..(303): Xaa is Tyr or Val
  MISC_FEATURE (304)..(304): Xaa is Gln or Ser
  MISC_FEATURE (309)..(309): Xaa is Gln or Ser
  MISC_FEATURE (311)..(311): Xaa is Tyr or Val
  MISC_FEATURE (312)..(312): Xaa is Gln or Ser
  MISC_FEATURE (317)..(317): Xaa is Gln or Ser
  MISC_FEATURE (319)..(319): Xaa is Tyr or Val
  MISC_FEATURE (320)..(320): Xaa is Gln or Ser
  MISC_FEATURE (325)..(325): Xaa is Gln or Ser
  MISC_FEATURE (327)..(327): Xaa is Tyr or Val
  MISC_FEATURE (328)..(328): Xaa is Gln or Ser
  MISC_FEATURE (333)..(333): Xaa is Gln or Ser
  MISC_FEATURE (335)..(335): Xaa is Tyr or Val
  MISC_FEATURE (336)..(336): Xaa is Gln or Ser
  MISC_FEATURE (341)..(341): Xaa is Gln or Ser
  MISC_FEATURE (343)..(343): Xaa is Tyr or Val
  MISC_FEATURE (344)..(344): Xaa is Gln or Ser
  MISC_FEATURE (349)..(349): Xaa is Gln or Ser
  MISC_FEATURE (351)..(351): Xaa is Tyr or Val
  MISC_FEATURE (352)..(352): Xaa is Gln or Ser
  MISC_FEATURE (357)..(357): Xaa is Gln or Ser
  MISC_FEATURE (359)..(359): Xaa is Tyr or Val
  MISC_FEATURE (360)..(360): Xaa is Gln or Ser
  MISC_FEATURE (365)..(365): Xaa is Gln or Ser
  MISC_FEATURE (367)..(367): Xaa is Tyr or Val
  MISC_FEATURE (368)..(368): Xaa is Gln or Ser
  MISC_FEATURE (373)..(373): Xaa is Gln or Ser
  MISC_FEATURE (375)..(375): Xaa is Tyr or Val
  MISC_FEATURE (376)..(376): Xaa is Gln or Ser
  MISC_FEATURE (381)..(381): Xaa is Gln or Ser
  MISC_FEATURE (383)..(383): Xaa is Tyr or Val
  MISC_FEATURE (384)..(384): Xaa is Gln or Ser
  MISC_FEATURE (389)..(389): Xaa is Gln or Ser
  MISC_FEATURE (391)..(391): Xaa is Tyr or Val
  MISC_FEATURE (392)..(392): Xaa is Gln or Ser
  MISC_FEATURE (397)..(397): Xaa is Gln or Ser
  MISC_FEATURE (399)..(399): Xaa is Tyr or Val
  MISC_FEATURE (400)..(400): Xaa is Gln or Ser
  MISC_FEATURE (405)..(405): Xaa is Gln or Ser
  MISC_FEATURE (407)..(407): Xaa is Tyr or Val
  MISC_FEATURE (408)..(408): Xaa is Gln or Ser
  MISC_FEATURE (413)..(413): Xaa is Gln or Ser
  MISC_FEATURE (415)..(415): Xaa is Tyr or Val
  MISC_FEATURE (416)..(416): Xaa is Gln or Ser
  MISC_FEATURE (421)..(421): Xaa is Gln or Ser
  MISC_FEATURE (423)..(423): Xaa is Tyr or Val
  MISC_FEATURE (424)..(424): Xaa is Gln or Ser
  MISC_FEATURE (429)..(429): Xaa is Gln or Ser
  MISC_FEATURE (431)..(431): Xaa is Tyr or Val
  MISC_FEATURE (432)..(432): Xaa is Gln or Ser
  MISC_FEATURE (437)..(437): Xaa is Gln or Ser
  MISC_FEATURE (439)..(439): Xaa is Tyr or Val
  MISC_FEATURE (440)..(440): Xaa is Gln or Ser
  MISC_FEATURE (445)..(445): Xaa is Gln or Ser
  MISC_FEATURE (447)..(447): Xaa is Tyr or Val
  MISC_FEATURE (448)..(448): Xaa is Gln or Ser
  MISC_FEATURE (453)..(453): Xaa is Gln or Ser
  MISC_FEATURE (455)..(455): Xaa is Tyr or Val
  MISC_FEATURE (456)..(456): Xaa is Gln or Ser
  MISC_FEATURE (461)..(461): Xaa is Gln or Ser
  MISC_FEATURE (463)..(463): Xaa is Tyr or Val
  MISC_FEATURE (464)..(464): Xaa is Gln or Ser
  MISC_FEATURE (469)..(469): Xaa is Gln or Ser
  MISC_FEATURE (471)..(471): Xaa is Tyr or Val
  MISC_FEATURE (472)..(472): Xaa is Gln or Ser
  MISC_FEATURE (477)..(477): Xaa is Gln or Ser
  MISC_FEATURE (479)..(479): Xaa is Tyr or Val
  MISC_FEATURE (480)..(480): Xaa is Gln or Ser
  MISC_FEATURE (485)..(485): Xaa is Gln or Ser
  MISC_FEATURE (487)..(487): Xaa is Tyr or Val
  MISC_FEATURE (488)..(488): Xaa is Gln or Ser
  MISC_FEATURE (493)..(493): Xaa is Gln or Ser
  MISC_FEATURE (495)..(495): Xaa is Tyr or Val
  MISC_FEATURE (496)..(496): Xaa is Gln or Ser
  MISC_FEATURE (501)..(501): Xaa is Gln or Ser
  MISC_FEATURE (503)..(503): Xaa is Tyr or Val
  MISC_FEATURE (504)..(504): Xaa is Gln or Ser
  MISC_FEATURE (509)..(509): Xaa is Gln or Ser
  MISC_FEATURE (511)..(511): Xaa is Tyr or Val
  MISC_FEATURE (512)..(512): Xaa is Gln or Ser
  MISC_FEATURE (517)..(517): Xaa is Gln or Ser
  MISC_FEATURE (519)..(519): Xaa is Tyr or Val
  MISC_FEATURE (520)..(520): Xaa is Gln or Ser
  MISC_FEATURE (525)..(525): Xaa is Gln or Ser
  MISC_FEATURE (527)..(527): Xaa is Tyr or Val
  MISC_FEATURE (528)..(528): Xaa is Gln or Ser
  MISC_FEATURE (533)..(533): Xaa is Gln or Ser
  MISC_FEATURE (535)..(535): Xaa is Tyr or Val
  MISC_FEATURE (536)..(536): Xaa is Gln or Ser
  MISC_FEATURE (541)..(541): Xaa is Gln or Ser
  MISC_FEATURE (543)..(543): Xaa is Tyr or Val
  MISC_FEATURE (544)..(544): Xaa is Gln or Ser
  MISC_FEATURE (549)..(549): Xaa is Gln or Ser
  MISC_FEATURE (551)..(551): Xaa is Tyr or Val
  MISC_FEATURE (552)..(552): Xaa is Gln or Ser
  MISC_FEATURE (557)..(557): Xaa is Gln or Ser
  MISC_FEATURE (559)..(559): Xaa is Tyr or Val
  MISC_FEATURE (560)..(560): Xaa is Gln or Ser
  MISC_FEATURE (565)..(565): Xaa is Gln or Ser
  MISC_FEATURE (567)..(567): Xaa is Tyr or Val
  MISC_FEATURE (568)..(568): Xaa is Gln or Ser
  MISC_FEATURE (573)..(573): Xaa is Gln or Ser
  MISC_FEATURE (575)..(575): Xaa is Tyr or Val
  MISC_FEATURE (576)..(576): Xaa is Gln or Ser
  MISC_FEATURE (581)..(581): Xaa is Gln or Ser
  MISC_FEATURE (583)..(583): Xaa is Tyr or Val
  MISC_FEATURE (584)..(584): Xaa is Gln or Ser
  MISC_FEATURE (589)..(589): Xaa is Gln or Ser
  MISC_FEATURE (591)..(591): Xaa is Tyr or Val
  MISC_FEATURE (592)..(592): Xaa is Gln or Ser
  MISC_FEATURE (597)..(597): Xaa is Gln or Ser
  MISC_FEATURE (599)..(599): Xaa is Tyr or Val
  MISC_FEATURE (600)..(600): Xaa is Gln or Ser
  MISC_FEATURE (605)..(605): Xaa is Gln or Ser
  MISC_FEATURE (607)..(607): Xaa is Tyr or Val
  MISC_FEATURE (608)..(608): Xaa is Gln or Ser
  MISC_FEATURE (613)..(613): Xaa is Gln or Ser
  MISC_FEATURE (615)..(615): Xaa is Tyr or Val
  MISC_FEATURE (616)..(616): Xaa is Gln or Ser
  MISC_FEATURE (621)..(621): Xaa is Gln or Ser
  MISC_FEATURE (623)..(623): Xaa is Tyr or Val
  MISC_FEATURE (624)..(624): Xaa is Gln or Ser
  MISC_FEATURE (629)..(629): Xaa is Gln or Ser
  MISC_FEATURE (631)..(631): Xaa is Tyr or Val
  MISC_FEATURE (632)..(632): Xaa is Gln or Ser
  MISC_FEATURE (637)..(637): Xaa is Gln or Ser
  MISC_FEATURE (639)..(639): Xaa is Tyr or Val
  MISC_FEATURE (640)..(640): Xaa is Gln or Ser
  MISC_FEATURE (645)..(645): Xaa is Gln or Ser
  MISC_FEATURE (647)..(647): Xaa is Tyr or Val
  MISC_FEATURE (648)..(648): Xaa is Gln or Ser
  MISC_FEATURE (653)..(653): Xaa is Gln or Ser
  MISC_FEATURE (655)..(655): Xaa is Tyr or Val
  MISC_FEATURE (656)..(656): Xaa is Gln or Ser
  MISC_FEATURE (661)..(661): Xaa is Gln or Ser
  MISC_FEATURE (663)..(663): Xaa is Tyr or Val
  MISC_FEATURE (664)..(664): Xaa is Gln or Ser
  MISC_FEATURE (669)..(669): Xaa is Gln or Ser
  MISC_FEATURE (671)..(671): Xaa is Tyr or Val
  MISC_FEATURE (672)..(672): Xaa is Gln or Ser
  MISC_FEATURE (677)..(677): Xaa is Gln or Ser
  MISC_FEATURE (679)..(679): Xaa is Tyr or Val
  MISC_FEATURE (680)..(680): Xaa is Gln or Ser
  MISC_FEATURE (685)..(685): Xaa is Gln or Ser
  MISC_FEATURE (687)..(687): Xaa is Tyr or Val
  MISC_FEATURE (688)..(688): Xaa is Gln or Ser
  MISC_FEATURE (693)..(693): Xaa is Gln or Ser
  MISC_FEATURE (695)..(695): Xaa is Tyr or Val
  MISC_FEATURE (696)..(696): Xaa is Gln or Ser
  MISC_FEATURE (701)..(701): Xaa is Gln or Ser
  MISC_FEATURE (703)..(703): Xaa is Tyr or Val
  MISC_FEATURE (704)..(704): Xaa is Gln or Ser
  MISC_FEATURE (709)..(709): Xaa is Gln or Ser
  MISC_FEATURE (711)..(711): Xaa is Tyr or Val
  MISC_FEATURE (712)..(712): Xaa is Gln or Ser
  MISC_FEATURE (717)..(717): Xaa is Gln or Ser
  MISC_FEATURE (719)..(719): Xaa is Tyr or Val
  MISC_FEATURE (720)..(720): Xaa is Gln or Ser
  MISC_FEATURE (725)..(725): Xaa is Gln or Ser
  MISC_FEATURE (727)..(727): Xaa is Tyr or Val
  MISC_FEATURE (728)..(728): Xaa is Gln or Ser
  MISC_FEATURE (733)..(733): Xaa is Gln or Ser
  MISC_FEATURE (735)..(735): Xaa is Tyr or Val
  MISC_FEATURE (736)..(736): Xaa is Gln or Ser
  MISC_FEATURE (741)..(741): Xaa is Gln or Ser
  MISC_FEATURE (743)..(743): Xaa is Tyr or Val
  MISC_FEATURE (744)..(744): Xaa is Gln or Ser
  MISC_FEATURE (749)..(749): Xaa is Gln or Ser
  MISC_FEATURE (751)..(751): Xaa is Tyr or Val
  MISC_FEATURE (752)..(752): Xaa is Gln or Ser
  MISC_FEATURE (757)..(757): Xaa is Gln or Ser
  MISC_FEATURE (759)..(759): Xaa is Tyr or Val
  MISC_FEATURE (760)..(760): Xaa is Gln or Ser
  MISC_FEATURE (765)..(765): Xaa is Gln or Ser
  MISC_FEATURE (767)..(767): Xaa is Tyr or Val
  MISC_FEATURE (768)..(768): Xaa is Gln or Ser
  MISC_FEATURE (773)..(773): Xaa is Gln or Ser
  MISC_FEATURE (775)..(775): Xaa is Tyr or Val
  MISC_FEATURE (776)..(776): Xaa is Gln or Ser
  MISC_FEATURE (781)..(781): Xaa is Gln or Ser
  MISC_FEATURE (783)..(783): Xaa is Tyr or Val
  MISC_FEATURE (784)..(784): Xaa is Gln or Ser
  MISC_FEATURE (789)..(789): Xaa is Gln or Ser
  MISC_FEATURE (791)..(791): Xaa is Tyr or Val
  MISC_FEATURE (792)..(792): Xaa is Gln or Ser
  MISC_FEATURE (797)..(797): Xaa is Gln or Ser
  MISC_FEATURE (799)..(799): Xaa is Tyr or Val
  MISC_FEATURE (800)..(800): Xaa is Gln or Ser
  MISC_FEATURE (805)..(805): Xaa is Gln or Ser
  MISC_FEATURE (807)..(807): Xaa is Tyr or Val
  MISC_FEATURE (808)..(808): Xaa is Gln or Ser
  MISC_FEATURE (813)..(813): Xaa is Gln or Ser
  MISC_FEATURE (815)..(815): Xaa is Tyr or Val
  MISC_FEATURE (816)..(816): Xaa is Gln or Ser
  MISC_FEATURE (821)..(821): Xaa is Gln or Ser
  MISC_FEATURE (823)..(823): Xaa is Tyr or Val
  MISC_FEATURE (824)..(824): Xaa is Gln or Ser
  MISC_FEATURE (829)..(829): Xaa is Gln or Ser
  MISC_FEATURE (831)..(831): Xaa is Tyr or Val
  MISC_FEATURE (832)..(832): Xaa is Gln or Ser
  MISC_FEATURE (837)..(837): Xaa is Gln or Ser
  MISC_FEATURE (839)..(839): Xaa is Tyr or Val
  MISC_FEATURE (840)..(840): Xaa is Gln or Ser
  MISC_FEATURE (845)..(845): Xaa is Gln or Ser
  MISC_FEATURE (847)..(847): Xaa is Tyr or Val
  MISC_FEATURE (848)..(848): Xaa is Gln or Ser
  MISC_FEATURE (853)..(853): Xaa is Gln or Ser
  MISC_FEATURE (855)..(855): Xaa is Tyr or Val
  MISC_FEATURE (856)..(856): Xaa is Gln or Ser
  MISC_FEATURE (861)..(861): Xaa is Gln or Ser
  MISC_FEATURE (863)..(863): Xaa is Tyr or Val
  MISC_FEATURE (864)..(864): Xaa is Gln or Ser
  MISC_FEATURE (869)..(869): Xaa is Gln or Ser
  MISC_FEATURE (871)..(871): Xaa is Tyr or Val
  MISC_FEATURE (872)..(872): Xaa is Gln or Ser
  MISC_FEATURE (877)..(877): Xaa is Gln or Ser
  MISC_FEATURE (879)..(879): Xaa is Tyr or Val
  MISC_FEATURE (880)..(880): Xaa is Gln or Ser
  MISC_FEATURE (885)..(885): Xaa is Gln or Ser
  MISC_FEATURE (887)..(887): Xaa is Tyr or Val
  MISC_FEATURE (888)..(888): Xaa is Gln or Ser
  MISC_FEATURE (893)..(893): Xaa is Gln or Ser
  MISC_FEATURE (895)..(895): Xaa is Tyr or Val
  MISC_FEATURE (896)..(896): Xaa is Gln or Ser
  MISC_FEATURE (901)..(901): Xaa is Gln or Ser
  MISC_FEATURE (903)..(903): Xaa is Tyr or Val
  MISC_FEATURE (904)..(904): Xaa is Gln or Ser
  MISC_FEATURE (909)..(909): Xaa is Gln or Ser
  MISC_FEATURE (911)..(911): Xaa is Tyr or Val
  MISC_FEATURE (912)..(912): Xaa is Gln or Ser
  MISC_FEATURE (917)..(917): Xaa is Gln or Ser
  MISC_FEATURE (919)..(919): Xaa is Tyr or Val
  MISC_FEATURE (920)..(920): Xaa is Gln or Ser
  MISC_FEATURE (925)..(925): Xaa is Gln or Ser
  MISC_FEATURE (927)..(927): Xaa is Tyr or Val
  MISC_FEATURE (928)..(928): Xaa is Gln or Ser
  MISC_FEATURE (933)..(933): Xaa is Gln or Ser
  MISC_FEATURE (935)..(935): Xaa is Tyr or Val
  MISC_FEATURE (936)..(936): Xaa is Gln or Ser
  MISC_FEATURE (941)..(941): Xaa is Gln or Ser
  MISC_FEATURE (943)..(943): Xaa is Tyr or Val
  MISC_FEATURE (944)..(944): Xaa is Gln or Ser
  MISC_FEATURE (949)..(949): Xaa is Gln or Ser
  MISC_FEATURE (951)..(951): Xaa is Tyr or Val
  MISC_FEATURE (952)..(952): Xaa is Gln or Ser
  MISC_FEATURE (957)..(957): Xaa is Gln or Ser
  MISC_FEATURE (959)..(959): Xaa is Tyr or Val
  MISC_FEATURE (960)..(960): Xaa is Gln or Ser
  MISC_FEATURE (965)..(965): Xaa is Gln or Ser
  MISC_FEATURE (967)..(967): Xaa is Tyr or Val
  MISC_FEATURE (968)..(968): Xaa is Gln or Ser
  MISC_FEATURE (973)..(973): Xaa is Gln or Ser
  MISC_FEATURE (975)..(975): Xaa is Tyr or Val
  MISC_FEATURE (976)..(976): Xaa is Gln or Ser
  MISC_FEATURE (981)..(981): Xaa is Gln or Ser
  MISC_FEATURE (983)..(983): Xaa is Tyr or Val
  MISC_FEATURE (984)..(984): Xaa is Gln or Ser
  MISC_FEATURE (989)..(989): Xaa is Gln or Ser
  MISC_FEATURE (991)..(991): Xaa is Tyr or Val
  MISC_FEATURE (992)..(992): Xaa is Gln or Ser
  MISC_FEATURE (997)..(997): Xaa is Gln or Ser
  MISC_FEATURE (999)..(999): Xaa is Tyr or Val
  MISC_FEATURE (1000)..(1000): Xaa is Gln or Ser
  MISC_FEATURE (1005)..(1005): Xaa is Gln or Ser
  MISC_FEATURE (1007)..(1007): Xaa is Tyr or Val
  MISC_FEATURE (1008)..(1008): Xaa is Gln or Ser
  MISC_FEATURE (1013)..(1013): Xaa is Gln or Ser
  MISC_FEATURE (1015)..(1015): Xaa is Tyr or Val
  MISC_FEATURE (1016)..(1016): Xaa is Gln or Ser
  MISC_FEATURE (1021)..(1021): Xaa is Gln or Ser
  MISC_FEATURE (1023)..(1023): Xaa is Tyr or Val
  MISC_FEATURE (1024)..(1024): Xaa is Gln or Ser
  MISC_FEATURE (1029)..(1029): Xaa is Gln or Ser
  MISC_FEATURE (1031)..(1031): Xaa is Tyr or Val
  MISC_FEATURE (1032)..(1032): Xaa is Gln or Ser
  MISC_FEATURE (1037)..(1037): Xaa is Gln or Ser
  MISC_FEATURE (1039)..(1039): Xaa is Tyr or Val
  MISC_FEATURE (1040)..(1040): Xaa is Gln or Ser
  MISC_FEATURE (1045)..(1045): Xaa is Gln or Ser
  MISC_FEATURE (1047)..(1047): Xaa is Tyr or Val
  MISC_FEATURE (1048)..(1048): Xaa is Gln or Ser
  MISC_FEATURE (1053)..(1053): Xaa is Gln or Ser
  MISC_FEATURE (1055)..(1055): Xaa is Tyr or Val
  MISC_FEATURE (1056)..(1056): Xaa is Gln or Ser
  MISC_FEATURE (1061)..(1061): Xaa is Gln or Ser
  MISC_FEATURE (1063)..(1063): Xaa is Tyr or Val
  MISC_FEATURE (1064)..(1064): Xaa is Gln or Ser
  MISC_FEATURE (1069)..(1069): Xaa is Gln or Ser
  MISC_FEATURE (1071)..(1071): Xaa is Tyr or Val
  MISC_FEATURE (1072)..(1072): Xaa is Gln or Ser
  MISC_FEATURE (1077)..(1077): Xaa is Gln or Ser
  MISC_FEATURE (1079)..(1079): Xaa is Tyr or Val
  MISC_FEATURE (1080)..(1080): Xaa is Gln or Ser
  MISC_FEATURE (1085)..(1085): Xaa is Gln or Ser
  MISC_FEATURE (1087)..(1087): Xaa is Tyr or Val
  MISC_FEATURE (1088)..(1088): Xaa is Gln or Ser
  MISC_FEATURE (1093)..(1093): Xaa is Gln or Ser
  MISC_FEATURE (1095)..(1095): Xaa is Tyr or Val
  MISC_FEATURE (1096)..(1096): Xaa is Gln or Ser
  MISC_FEATURE (1101)..(1101): Xaa is Gln or Ser
  MISC_FEATURE (1103)..(1103): Xaa is Tyr or Val
  MISC_FEATURE (1104)..(1104): Xaa is Gln or Ser
  MISC_FEATURE (1109)..(1109): Xaa is Gln or Ser
  MISC_FEATURE (1111)..(1111): Xaa is Tyr or Val
  MISC_FEATURE (1112)..(1112): Xaa is Gln or Ser
  MISC_FEATURE (1117)..(1117): Xaa is Gln or Ser
  MISC_FEATURE (1119)..(1119): Xaa is Tyr or Val
  MISC_FEATURE (1120)..(1120): Xaa is Gln or Ser
  MISC_FEATURE (1125)..(1125): Xaa is Gln or Ser
  MISC_FEATURE (1127)..(1127): Xaa is Tyr or Val
  MISC_FEATURE (1128)..(1128): Xaa is Gln or Ser
  MISC_FEATURE (1133)..(1133): Xaa is Gln or Ser
  MISC_FEATURE (1135)..(1135): Xaa is Tyr or Val
  MISC_FEATURE (1136)..(1136): Xaa is Gln or Ser
  MISC_FEATURE (1141)..(1141): Xaa is Gln or Ser
  MISC_FEATURE (1143)..(1143): Xaa is Tyr or Val
  MISC_FEATURE (1144)..(1144): Xaa is Gln or Ser
  MISC_FEATURE (1149)..(1149): Xaa is Gln or Ser
  MISC_FEATURE (1151)..(1151): Xaa is Tyr or Val
  MISC_FEATURE (1152)..(1152): Xaa is Gln or Ser
  MISC_FEATURE (1157)..(1157): Xaa is Gln or Ser
  MISC_FEATURE (1159)..(1159): Xaa is Tyr or Val
  MISC_FEATURE (1160)..(1160): Xaa is Gln or Ser
  MISC_FEATURE (1165)..(1165): Xaa is Gln or Ser
  MISC_FEATURE (1167)..(1167): Xaa is Tyr or Val
  MISC_FEATURE (1168)..(1168): Xaa is Gln or Ser
  MISC_FEATURE (1173)..(1173): Xaa is Gln or Ser
  MISC_FEATURE (1175)..(1175): Xaa is Tyr or Val
  MISC_FEATURE (1176)..(1176): Xaa is Gln or Ser
  MISC_FEATURE (1181)..(1181): Xaa is Gln or Ser
  MISC_FEATURE (1183)..(1183): Xaa is Tyr or Val
  MISC_FEATURE (1184)..(1184): Xaa is Gln or Ser
  MISC_FEATURE (1189)..(1189): Xaa is Gln or Ser
  MISC_FEATURE (1191)..(1191): Xaa is Tyr or Val
  MISC_FEATURE (1192)..(1192): Xaa is Gln or Ser
  MISC_FEATURE (1197)..(1197): Xaa is Gln or Ser
  MISC_FEATURE (1199)..(1199): Xaa is Tyr or Val
  MISC_FEATURE (1200)..(1200): Xaa is Gln or Ser
  MISC_FEATURE (1205)..(1205): Xaa is Gln or Ser
  MISC_FEATURE (1207)..(1207): Xaa is Tyr or Val
  MISC_FEATURE (1208)..(1208): Xaa is Gln or Ser
  MISC_FEATURE (1213)..(1213): Xaa is Gln or Ser
  MISC_FEATURE (1215)..(1215): Xaa is Tyr or Val
  MISC_FEATURE (1216)..(1216): Xaa is Gln or Ser
  MISC_FEATURE (1221)..(1221): Xaa is Gln or Ser
  MISC_FEATURE (1223)..(1223): Xaa is Tyr or Val
  MISC_FEATURE (1224)..(1224): Xaa is Gln or Ser
  MISC_FEATURE (1229)..(1229): Xaa is Gln or Ser
  MISC_FEATURE (1231)..(1231): Xaa is Tyr or Val
  MISC_FEATURE (1232)..(1232): Xaa is Gln or Ser
  MISC_FEATURE (1237)..(1237): Xaa is Gln or Ser
  MISC_FEATURE (1239)..(1239): Xaa is Tyr or Val
  MISC_FEATURE (1240)..(1240): Xaa is Gln or Ser
  MISC_FEATURE (1245)..(1245): Xaa is Gln or Ser
  MISC_FEATURE (1247)..(1247): Xaa is Tyr or Val
  MISC_FEATURE (1248)..(1248): Xaa is Gln or Ser
  MISC_FEATURE (1253)..(1253): Xaa is Gln or Ser
  MISC_FEATURE (1255)..(1255): Xaa is Tyr or Val
  MISC_FEATURE (1256)..(1256): Xaa is Gln or Ser
  MISC_FEATURE (1261)..(1261): Xaa is Gln or Ser
  MISC_FEATURE (1263)..(1263): Xaa is Tyr or Val
  MISC_FEATURE (1264)..(1264): Xaa is Gln or Ser
  MISC_FEATURE (1269)..(1269): Xaa is Gln or Ser
  MISC_FEATURE (1271)..(1271): Xaa is Tyr or Val
  MISC_FEATURE (1272)..(1272): Xaa is Gln or Ser
  MISC_FEATURE (1277)..(1277): Xaa is Gln or Ser
  MISC_FEATURE (1279)..(1279): Xaa is Tyr or Val
  MISC_FEATURE (1280)..(1280): Xaa is Gln or Ser
GRGDXPXXGRGDXPXXGRGDXPXXGRGDXPXXGRGDXPXXGRGDXPXXGRGDXPXXGRGDXPXXGRGDXPXXGRGDXPXXGRGDXPXXGRGDXPXXGRGDXPXXGRGDXPXXGRGDXPXXGRGDXPXXGRGDXPXXGRGDXPXXGRGDXPXXGRGDXPXXGRGDXPXXGRGDXPXXGRGDXPXXGRGDXPXXGRGDXPXXGRGDXPXXGRGDXPXXGRGDXPXXGRGDXPXXGRGDXPXXGRGDXPXXGRGDXPXXGRGDXPXXGRGDXPXXGRGDXPXXGRGDXPXXGRGDXPXXGRGDXPXXGRGDXPXXGRGDXPXXGRGDXPXXGRGDXPXXGRGDXPXXGRGDXPXXGRGDXPXXGRGDXPXXGRGDXPXXGRGDXPXXGRGDXPXXGRGDXPXXGRGDXPXXGRGDXPXXGRGDXPXXGRGDXPXXGRGDXPXXGRGDXPXXGRGDXPXXGRGDXPXXGRGDXPXXGRGDXPXXGRGDXPXXGRGDXPXXGRGDXPXXGRGDXPXXGRGDXPXXGRGDXPXXGRGDXPXXGRGDXPXXGRGDXPXXGRGDXPXXGRGDXPXXGRGDXPXXGRGDXPXXGRGDXPXXGRGDXPXXGRGDXPXXGRGDXPXXGRGDXPXXGRGDXPXXGRGDXPXXGRGDXPXXGRGDXPXXGRGDXPXXGRGDXPXXGRGDXPXXGRGDXPXXGRGDXPXXGRGDXPXXGRGDXPXXGRGDXPXXGRGDXPXXGRGDXPXXGRGDXPXXGRGDXPXXGRGDXPXXGRGDXPXXGRGDXPXXGRGDXPXXGRGDXPXXGRGDXPXXGRGDXPXXGRGDXPXXGRGDXPXXGRGDXPXXGRGDXPXXGRGDXPXXGRGDXPXXGRGDXPXXGRGDXPXXGRGDXPXXGRGDXPXXGRGDXPXXGRGDXPXXGRGDXPXXGRGDXPXXGRGDXPXXGRGDXPXXGRGDXPXXGRGDXPXXGRGDXPXXGRGDXPXXGRGDXPXXGRGDXPXXGRGDXPXXGRGDXPXXGRGDXPXXGRGDXPXXGRGDXPXXGRGDXPXXGRGDXPXXGRGDXPXXGRGDXPXXGRGDXPXXGRGDXPXXGRGDXPXXGRGDXPXXGRGDXPXXGRGDXPXXGRGDXPXXGRGDXPXXGRGDXPXXGRGDXPXXGRGDXPXXGRGDXPXXGRGDXPXXGRGDXPXXGRGDXPXXGRGDXPXXGRGDXPXXGRGDXPXXGRGDXPXXGRGDXPXXGRGDXPXXGRGDXPXXGRGDXPXXGRGDXPXXGRGDXPXXGRGDXPXXGRGDXPXXGRGDXPXX

SEQ ID NO: 61 - protein, 1280 aa, Artificial Sequence
  elastin-like polypeptide
  MISC_FEATURE (1)..(1): Xaa is Gln or Ser
  MISC_FEATURE (2)..(2): Xaa is Tyr or Val
  MISC_FEATURE (4)..(4): Xaa is Gln or Ser
  MISC_FEATURE (9)..(9): Xaa is Gln or Ser
  MISC_FEATURE (10)..(10): Xaa is Tyr or Val
  MISC_FEATURE (12)..(12): Xaa is Gln or Ser
  MISC_FEATURE (17)..(17): Xaa is Gln or Ser
  MISC_FEATURE (18)..(18): Xaa is Tyr or Val
  MISC_FEATURE (20)..(20): Xaa is Gln or Ser
  MISC_FEATURE (25)..(25): Xaa is Gln or Ser
  MISC_FEATURE (26)..(26): Xaa is Tyr or Val
  MISC_FEATURE (28)..(28): Xaa is Gln or Ser
  MISC_FEATURE (33)..(33): Xaa is Gln or Ser
  MISC_FEATURE (34)..(34): Xaa is Tyr or Val
  MISC_FEATURE (36)..(36): Xaa is Gln or Ser
  MISC_FEATURE (41)..(41): Xaa is Gln or Ser
  MISC_FEATURE (42)..(42): Xaa is Tyr or Val
  MISC_FEATURE (44)..(44): Xaa is Gln or Ser
  MISC_FEATURE (49)..(49): Xaa is Gln or Ser
  MISC_FEATURE (50)..(50): Xaa is Tyr or Val
  MISC_FEATURE (52)..(52): Xaa is Gln or Ser
  MISC_FEATURE (57)..(57): Xaa is Gln or Ser
  MISC_FEATURE (58)..(58): Xaa is Tyr or Val
  MISC_FEATURE (60)..(60): Xaa is Gln or Ser
  MISC_FEATURE (65)..(65): Xaa is Gln or Ser
  MISC_FEATURE (66)..(66): Xaa is Tyr or Val
  MISC_FEATURE (68)..(68): Xaa is Gln or Ser
  MISC_FEATURE (73)..(73): Xaa is Gln or Ser
  MISC_FEATURE (74)..(74): Xaa is Tyr or Val
  MISC_FEATURE (76)..(76): Xaa is Gln or Ser
  MISC_FEATURE (81)..(1280): May be present or absent in groups of the repeat unit Xaa Xaa Pro Xaa Asp Gly Arg Gly
  MISC_FEATURE (81)..(81): Xaa is Gln or Ser
  MISC_FEATURE (82)..(82): Xaa is Tyr or Val
  MISC_FEATURE (84)..(84): Xaa is Gln or Ser
  MISC_FEATURE (89)..(89): Xaa is Gln or Ser
  MISC_FEATURE (90)..(90): Xaa is Tyr or Val
  MISC_FEATURE (92)..(92): Xaa is Gln or Ser
  MISC_FEATURE (97)..(97): Xaa is Gln or Ser
  MISC_FEATURE (98)..(98): Xaa is Tyr or Val
  MISC_FEATURE (100)..(100): Xaa is Gln or Ser
  MISC_FEATURE (105)..(105): Xaa is Gln or Ser
  MISC_FEATURE (106)..(106): Xaa is Tyr or Val
  MISC_FEATURE (108)..(108): Xaa is Gln or Ser
  MISC_FEATURE (113)..(113): Xaa is Gln or Ser
  MISC_FEATURE (114)..(114): Xaa is Tyr or Val
  MISC_FEATURE (116)..(116): Xaa is Gln or Ser
  MISC_FEATURE (121)..(121): Xaa is Gln or Ser
  MISC_FEATURE (122)..(122): Xaa is Tyr or Val
  MISC_FEATURE (124)..(124): Xaa is Gln or Ser
  MISC_FEATURE (129)..(129): Xaa is Gln or Ser
  MISC_FEATURE (130)..(130): Xaa is Tyr or Val
  MISC_FEATURE (132)..(132): Xaa is Gln or Ser
  MISC_FEATURE (137)..(137): Xaa is Gln or Ser
  MISC_FEATURE (138)..(138): Xaa is Tyr or Val
  MISC_FEATURE (140)..(140): Xaa is Gln or Ser
  MISC_FEATURE (145)..(145): Xaa is Gln or Ser
  MISC_FEATURE (146)..(146): Xaa is Tyr or Val
  MISC_FEATURE (148)..(148): Xaa is Gln or Ser
  MISC_FEATURE (153)..(153): Xaa is Gln or Ser
  MISC_FEATURE (154)..(154): Xaa is Tyr or Val
  MISC_FEATURE (156)..(156): Xaa is Gln or Ser
  MISC_FEATURE (161)..(161): Xaa is Gln or Ser
  MISC_FEATURE (162)..(162): Xaa is Tyr or Val
  MISC_FEATURE (164)..(164): Xaa is Gln or Ser
  MISC_FEATURE (169)..(169): Xaa is Gln or Ser
  MISC_FEATURE (170)..(170): Xaa is Tyr or Val
  MISC_FEATURE (172)..(172): Xaa is Gln or Ser
  MISC_FEATURE (177)..(177): Xaa is Gln or Ser
  MISC_FEATURE (178)..(178): Xaa is Tyr or Val
  MISC_FEATURE (180)..(180): Xaa is Gln or Ser
  MISC_FEATURE (185)..(185): Xaa is Gln or Ser
  MISC_FEATURE (186)..(186): Xaa is Tyr or Val
  MISC_FEATURE (188)..(188): Xaa is Gln or Ser
  MISC_FEATURE (193)..(193): Xaa is Gln or Ser
  MISC_FEATURE (194)..(194): Xaa is Tyr or Val
  MISC_FEATURE (196)..(196): Xaa is Gln or Ser
  MISC_FEATURE (201)..(201): Xaa is Gln or Ser
  MISC_FEATURE (202)..(202): Xaa is Tyr or Val
  MISC_FEATURE (204)..(204): Xaa is Gln or Ser
  MISC_FEATURE (209)..(209): Xaa is Gln or Ser
  MISC_FEATURE (210)..(210): Xaa is Tyr or Val
  MISC_FEATURE (212)..(212): Xaa is Gln or Ser
  MISC_FEATURE (217)..(217): Xaa is Gln or Ser
  MISC_FEATURE (218)..(218): Xaa is Tyr or Val
  MISC_FEATURE (220)..(220): Xaa is Gln or Ser
  MISC_FEATURE (225)..(225): Xaa is Gln or Ser
  MISC_FEATURE (226)..(226): Xaa is Tyr or Val
  MISC_FEATURE (228)..(228): Xaa is Gln or Ser
  MISC_FEATURE (233)..(233): Xaa is Gln or Ser
  MISC_FEATURE (234)..(234): Xaa is Tyr or Val
  MISC_FEATURE (236)..(236): Xaa is Gln or Ser
  MISC_FEATURE (241)..(241): Xaa is Gln or Ser
  MISC_FEATURE (242)..(242): Xaa is Tyr or Val
  MISC_FEATURE (244)..(244): Xaa is Gln or Ser
  MISC_FEATURE (249)..(249): Xaa is Gln or Ser
  MISC_FEATURE (250)..(250): Xaa is Tyr or Val
  MISC_FEATURE (252)..(252): Xaa is Gln or Ser
  MISC_FEATURE (257)..(257): Xaa is Gln or Ser
  MISC_FEATURE (258)..(258): Xaa is Tyr or Val
  MISC_FEATURE (260)..(260): Xaa is Gln or Ser
  MISC_FEATURE (265)..(265): Xaa is Gln or Ser
  MISC_FEATURE (266)..(266): Xaa is Tyr or Val
  MISC_FEATURE (268)..(268): Xaa is Gln or Ser
  MISC_FEATURE (273)..(273): Xaa is Gln or Ser
  MISC_FEATURE (274)..(274): Xaa is Tyr or Val
  MISC_FEATURE (276)..(276): Xaa is Gln or Ser
  MISC_FEATURE (281)..(281): Xaa is Gln or Ser
  MISC_FEATURE (282)..(282): Xaa is Tyr or Val
  MISC_FEATURE (284)..(284): Xaa is Gln or Ser
  MISC_FEATURE (289)..(289): Xaa is Gln or Ser
  MISC_FEATURE (290)..(290): Xaa is Tyr or Val
  MISC_FEATURE (292)..(292): Xaa is Gln or Ser
  MISC_FEATURE (297)..(297): Xaa is Gln or Ser
  MISC_FEATURE (298)..(298): Xaa is Tyr or Val
  MISC_FEATURE (300)..(300): Xaa is Gln or Ser
  MISC_FEATURE (305)..(305): Xaa is Gln or Ser
  MISC_FEATURE (306)..(306): Xaa is Tyr or Val
  MISC_FEATURE (308)..(308): Xaa is Gln or Ser
  MISC_FEATURE (313)..(313): Xaa is Gln or Ser
  MISC_FEATURE (314)..(314): Xaa is Tyr or Val
  MISC_FEATURE (316)..(316): Xaa is Gln or Ser
  MISC_FEATURE (321)..(321): Xaa is Gln or Ser
  MISC_FEATURE (322)..(322): Xaa is Tyr or Val
  MISC_FEATURE (324)..(324): Xaa is Gln or Ser
  MISC_FEATURE (329)..(329): Xaa is Gln or Ser
  MISC_FEATURE (330)..(330): Xaa is Tyr or Val
  MISC_FEATURE (332)..(332): Xaa is Gln or Ser
  MISC_FEATURE (337)..(337): Xaa is Gln or Ser
  MISC_FEATURE (338)..(338): Xaa is Tyr or Val
  MISC_FEATURE (340)..(340): Xaa is Gln or Ser
  MISC_FEATURE (345)..(345): Xaa is Gln or Ser
  MISC_FEATURE (346)..(346): Xaa is Tyr or Val
  MISC_FEATURE (348)..(348): Xaa is Gln or Ser
  MISC_FEATURE (353)..(353): Xaa is Gln or Ser
  MISC_FEATURE (354)..(354): Xaa is Tyr or Val
  MISC_FEATURE (356)..(356): Xaa is Gln or Ser
  MISC_FEATURE (361)..(361): Xaa is Gln or Ser
  MISC_FEATURE (362)..(362): Xaa is Tyr or Val
  MISC_FEATURE (364)..(364): Xaa is Gln or Ser
  MISC_FEATURE (369)..(369): Xaa is Gln or Ser
  MISC_FEATURE (370)..(370): Xaa is Tyr or Val
  MISC_FEATURE (372)..(372): Xaa is Gln or Ser
  MISC_FEATURE (377)..(377): Xaa is Gln or Ser
  MISC_FEATURE (378)..(378): Xaa is Tyr or Val
  MISC_FEATURE (380)..(380): Xaa is Gln or Ser
  MISC_FEATURE (385)..(385): Xaa is Gln or Ser
  MISC_FEATURE (386)..(386): Xaa is Tyr or Val
  MISC_FEATURE (388)..(388): Xaa is Gln or Ser
  MISC_FEATURE (393)..(393): Xaa is Gln or Ser
  MISC_FEATURE (394)..(394): Xaa is Tyr or Val
  MISC_FEATURE (396)..(396): Xaa is Gln or Ser
  MISC_FEATURE (401)..(401): Xaa is Gln or Ser
  MISC_FEATURE (402)..(402): Xaa is Tyr or Val
  MISC_FEATURE (404)..(404): Xaa is Gln or Ser
  MISC_FEATURE (409)..(409): Xaa is Gln or Ser
  MISC_FEATURE (410)..(410): Xaa is Tyr or Val
  MISC_FEATURE (412)..(412): Xaa is Gln or Ser
  MISC_FEATURE (417)..(417): Xaa is Gln or Ser
  MISC_FEATURE (418)..(418): Xaa is Tyr or Val
  MISC_FEATURE (420)..(420): Xaa is Gln or Ser
  MISC_FEATURE (425)..(425): Xaa is Gln or Ser
  MISC_FEATURE (426)..(426): Xaa is Tyr or Val
  MISC_FEATURE (428)..(428): Xaa is Gln or Ser
  MISC_FEATURE (433)..(433): Xaa is Gln or Ser
  MISC_FEATURE (434)..(434): Xaa is Tyr or Val
  MISC_FEATURE (436)..(436): Xaa is Gln or Ser
  MISC_FEATURE (441)..(441): Xaa is Gln or Ser
  MISC_FEATURE (442)..(442): Xaa is Tyr or Val
  MISC_FEATURE (444)..(444): Xaa is Gln or Ser
  MISC_FEATURE (449)..(449): Xaa is Gln or Ser
  MISC_FEATURE (450)..(450): Xaa is Tyr or Val
  MISC_FEATURE (452)..(452): Xaa is Gln or Ser
  MISC_FEATURE (457)..(457): Xaa is Gln or Ser
  MISC_FEATURE (458)..(458): Xaa is Tyr or Val
  MISC_FEATURE (460)..(460): Xaa is Gln or Ser
  MISC_FEATURE (465)..(465): Xaa is Gln or Ser
  MISC_FEATURE (466)..(466): Xaa is Tyr or Val
  MISC_FEATURE (468)..(468): Xaa is Gln or Ser
  MISC_FEATURE (473)..(473): Xaa is Gln or Ser
  MISC_FEATURE (474)..(474): Xaa is Tyr or Val
  MISC_FEATURE (476)..(476): Xaa is Gln or Ser
  MISC_FEATURE (481)..(481): Xaa is Gln or Ser
  MISC_FEATURE (482)..(482): Xaa is Tyr or Val
  MISC_FEATURE (484)..(484): Xaa is Gln or Ser
  MISC_FEATURE (489)..(489): Xaa is Gln or Ser
  MISC_FEATURE (490)..(490): Xaa is Tyr or Val
  MISC_FEATURE (492)..(492): Xaa is Gln or Ser
  MISC_FEATURE (497)..(497): Xaa is Gln or Ser
  MISC_FEATURE (498)..(498): Xaa is Tyr or Val
  MISC_FEATURE (500)..(500): Xaa is Gln or Ser
  MISC_FEATURE (505)..(505): Xaa is Gln or Ser
  MISC_FEATURE (506)..(506): Xaa is Tyr or Val
  MISC_FEATURE (508)..(508): Xaa is Gln or Ser
  MISC_FEATURE (513)..(513): Xaa is Gln or Ser
  MISC_FEATURE (514)..(514): Xaa is Tyr or Val
  MISC_FEATURE (516)..(516): Xaa is Gln or Ser
  MISC_FEATURE (521)..(521): Xaa is Gln or Ser
  MISC_FEATURE (522)..(522): Xaa is Tyr or Val
  MISC_FEATURE (524)..(524): Xaa is Gln or Ser
  MISC_FEATURE (529)..(529): Xaa is Gln or Ser
  MISC_FEATURE (530)..(530): Xaa is Tyr or Val
  MISC_FEATURE (532)..(532): Xaa is Gln or Ser
  MISC_FEATURE (537)..(537): Xaa is Gln or Ser
  MISC_FEATURE (538)..(538): Xaa is Tyr or Val
  MISC_FEATURE (540)..(540): Xaa is Gln or Ser
  MISC_FEATURE (545)..(545): Xaa is Gln or Ser
  MISC_FEATURE (546)..(546): Xaa is Tyr or Val
  MISC_FEATURE (548)..(548): Xaa is Gln or Ser
  MISC_FEATURE (553)..(553): Xaa is Gln or Ser
  MISC_FEATURE (554)..(554): Xaa is Tyr or Val
  MISC_FEATURE (556)..(556): Xaa is Gln or Ser
  MISC_FEATURE (561)..(561): Xaa is Gln or Ser
  MISC_FEATURE (562)..(562): Xaa is Tyr or Val
  MISC_FEATURE (564)..(564): Xaa is Gln or Ser
  MISC_FEATURE (569)..(569): Xaa is Gln or Ser
  MISC_FEATURE (570)..(570): Xaa is Tyr or Val
  MISC_FEATURE (572)..(572): Xaa is Gln or Ser
  MISC_FEATURE (577)..(577): Xaa is Gln or Ser
  MISC_FEATURE (578)..(578): Xaa is Tyr or Val
  MISC_FEATURE (580)..(580): Xaa is Gln or Ser
  MISC_FEATURE (585)..(585): Xaa is Gln or Ser
  MISC_FEATURE (586)..(586): Xaa is Tyr or Val
  MISC_FEATURE (588)..(588): Xaa is Gln or Ser
  MISC_FEATURE (593)..(593): Xaa is Gln or Ser
  MISC_FEATURE (594)..(594): Xaa is Tyr or Val
  MISC_FEATURE (596)..(596): Xaa is Gln or Ser
  MISC_FEATURE (601)..(601): Xaa is Gln or Ser
  MISC_FEATURE (602)..(602): Xaa is Tyr or Val
  MISC_FEATURE (604)..(604): Xaa is Gln or Ser
  MISC_FEATURE (609)..(609): Xaa is Gln or Ser
  MISC_FEATURE (610)..(610): Xaa is Tyr or Val
  MISC_FEATURE (612)..(612): Xaa is Gln or Ser
  MISC_FEATURE (617)..(617): Xaa is Gln or Ser
  MISC_FEATURE (618)..(618): Xaa is Tyr or Val
  MISC_FEATURE (620)..(620): Xaa is Gln or Ser
  MISC_FEATURE (625)..(625): Xaa is Gln or Ser
  MISC_FEATURE (626)..(626): Xaa is Tyr or Val
  MISC_FEATURE (628)..(628): Xaa is Gln or Ser
  MISC_FEATURE (633)..(633): Xaa is Gln or Ser
  MISC_FEATURE (634)..(634): Xaa is Tyr or Val
  MISC_FEATURE (636)..(636): Xaa is Gln or Ser
  MISC_FEATURE (641)..(641): Xaa is Gln or Ser
  MISC_FEATURE (642)..(642): Xaa is Tyr or Val
  MISC_FEATURE (644)..(644): Xaa is Gln or Ser
  MISC_FEATURE (649)..(649): Xaa is Gln or Ser
  MISC_FEATURE (650)..(650): Xaa is Tyr or Val
  MISC_FEATURE (652)..(652): Xaa is Gln or Ser
  MISC_FEATURE (657)..(657): Xaa is Gln or Ser
  MISC_FEATURE (658)..(658): Xaa is Tyr or Val
  MISC_FEATURE (660)..(660): Xaa is Gln or Ser
  MISC_FEATURE (665)..(665): Xaa is Gln or Ser
  MISC_FEATURE (666)..(666): Xaa is Tyr or Val
  MISC_FEATURE (668)..(668): Xaa is Gln or Ser
  MISC_FEATURE (673)..(673): Xaa is Gln or Ser
  MISC_FEATURE (674)..(674): Xaa is Tyr or Val
  MISC_FEATURE (676)..(676): Xaa is Gln or Ser
  MISC_FEATURE (681)..(681): Xaa is Gln or Ser
  MISC_FEATURE (682)..(682): Xaa is Tyr or Val
  MISC_FEATURE (684)..(684): Xaa is Gln or Ser
  MISC_FEATURE (689)..(689): Xaa is Gln or Ser
  MISC_FEATURE (690)..(690): Xaa is Tyr or Val
  MISC_FEATURE (692)..(692): Xaa is Gln or Ser
  MISC_FEATURE (697)..(697): Xaa is Gln or Ser
  MISC_FEATURE (698)..(698): Xaa is Tyr or Val
  MISC_FEATURE (700)..(700): Xaa is Gln or Ser
  MISC_FEATURE (705)..(705): Xaa is Gln or Ser
  MISC_FEATURE (706)..(706): Xaa is Tyr or Val
  MISC_FEATURE (708)..(708): Xaa is Gln or Ser
  MISC_FEATURE (713)..(713): Xaa is Gln or Ser
  MISC_FEATURE (714)..(714): Xaa is Tyr or Val
  MISC_FEATURE (716)..(716): Xaa is Gln or Ser
  MISC_FEATURE (721)..(721): Xaa is Gln or Ser
  MISC_FEATURE (722)..(722): Xaa is Tyr or Val
  MISC_FEATURE (724)..(724): Xaa is Gln or Ser
  MISC_FEATURE (729)..(729): Xaa is Gln or Ser
  MISC_FEATURE (730)..(730): Xaa is Tyr or Val
  MISC_FEATURE (732)..(732): Xaa is Gln or Ser
  MISC_FEATURE (737)..(737): Xaa is Gln or Ser
  MISC_FEATURE (738)..(738): Xaa is Tyr or Val
  MISC_FEATURE (740)..(740): Xaa is Gln or Ser
  MISC_FEATURE (745)..(745): Xaa is Gln or Ser
  MISC_FEATURE (746)..(746): Xaa is Tyr or Val
  MISC_FEATURE (748)..(748): Xaa is Gln or Ser
  MISC_FEATURE (753)..(753): Xaa is Gln or Ser
  MISC_FEATURE (754)..(754): Xaa is Tyr or Val
  MISC_FEATURE (756)..(756): Xaa is Gln or Ser
  MISC_FEATURE (761)..(761): Xaa is Gln or Ser
  MISC_FEATURE (762)..(762): Xaa is Tyr or Val
  MISC_FEATURE (764)..(764): Xaa is Gln or Ser
  MISC_FEATURE (769)..(769): Xaa is Gln or Ser
  MISC_FEATURE (770)..(770): Xaa is Tyr or Val
  MISC_FEATURE (772)..(772): Xaa is Gln or Ser
  MISC_FEATURE (777)..(777): Xaa is Gln or Ser
  MISC_FEATURE (778)..(778): Xaa is Tyr or Val
  MISC_FEATURE (780)..(780): Xaa is Gln or Ser
  MISC_FEATURE (785)..(785): Xaa is Gln or Ser
  MISC_FEATURE (786)..(786): Xaa is Tyr or Val
  MISC_FEATURE (788)..(788): Xaa is Gln or Ser
  MISC_FEATURE (793)..(793): Xaa is Gln or Ser
  MISC_FEATURE (794)..(794): Xaa is Tyr or Val
  MISC_FEATURE (796)..(796): Xaa is Gln or Ser
  MISC_FEATURE (801)..(801): Xaa is Gln or Ser
  MISC_FEATURE (802)..(802): Xaa is Tyr or Val
  MISC_FEATURE (804)..(804): Xaa is Gln or Ser
  MISC_FEATURE (809)..(809): Xaa is Gln or Ser
  MISC_FEATURE (810)..(810): Xaa is Tyr or Val
  MISC_FEATURE (812)..(812): Xaa is Gln or Ser
  MISC_FEATURE (817)..(817): Xaa is Gln or Ser
  MISC_FEATURE (818)..(818): Xaa is Tyr or Val
  MISC_FEATURE (820)..(820): Xaa is Gln or Ser
  MISC_FEATURE (825)..(825): Xaa is Gln or Ser
  MISC_FEATURE (826)..(826): Xaa is Tyr or Val
  MISC_FEATURE (828)..(828): Xaa is Gln or Ser
  MISC_FEATURE (833)..(833): Xaa is Gln or Ser
  MISC_FEATURE (834)..(834): Xaa is Tyr or Val
  MISC_FEATURE (836)..(836): Xaa is Gln or Ser
  MISC_FEATURE (841)..(841): Xaa is Gln or Ser
  MISC_FEATURE (842)..(842): Xaa is Tyr or Val
  MISC_FEATURE (844)..(844): Xaa is Gln or Ser
  MISC_FEATURE (849)..(849): Xaa is Gln or Ser
  MISC_FEATURE (850)..(850): Xaa is Tyr or Val
  MISC_FEATURE (852)..(852): Xaa is Gln or Ser
  MISC_FEATURE (857)..(857): Xaa is Gln or Ser
  MISC_FEATURE (858)..(858): Xaa is Tyr or Val
  MISC_FEATURE (860)..(860): Xaa is Gln or Ser
  MISC_FEATURE (865)..(865): Xaa is Gln or Ser
  MISC_FEATURE (866)..(866): Xaa is Tyr or Val
  MISC_FEATURE (868)..(868): Xaa is Gln or Ser
  MISC_FEATURE (873)..(873): Xaa is Gln or Ser
  MISC_FEATURE (874)..(874): Xaa is Tyr or Val
  MISC_FEATURE (876)..(876): Xaa is Gln or Ser
  MISC_FEATURE (881)..(881): Xaa is Gln or Ser
  MISC_FEATURE (882)..(882): Xaa is Tyr or Val
  MISC_FEATURE (884)..(884): Xaa is Gln or Ser
  MISC_FEATURE (889)..(889): Xaa is Gln or Ser
  MISC_FEATURE (890)..(890): Xaa is Tyr or Val
  MISC_FEATURE (892)..(892): Xaa is Gln or Ser
  MISC_FEATURE (897)..(897): Xaa is Gln or Ser
  MISC_FEATURE (898)..(898): Xaa is Tyr or Val
  MISC_FEATURE (900)..(900): Xaa is Gln or Ser
  MISC_FEATURE (905)..(905): Xaa is Gln or Ser
  MISC_FEATURE (906)..(906): Xaa is Tyr or Val
  MISC_FEATURE (908)..(908): Xaa is Gln or Ser
  MISC_FEATURE (913)..(913): Xaa is Gln or Ser
  MISC_FEATURE (914)..(914): Xaa is Tyr or Val
  MISC_FEATURE (916)..(916): Xaa is Gln or Ser
  MISC_FEATURE (921)..(921): Xaa is Gln or Ser
  MISC_FEATURE (922)..(922): Xaa is Tyr or Val
  MISC_FEATURE (924)..(924): Xaa is Gln or Ser
  MISC_FEATURE (929)..(929): Xaa is Gln or Ser
  MISC_FEATURE (930)..(930): Xaa is Tyr or Val
  MISC_FEATURE (932)..(932): Xaa is Gln or Ser
  MISC_FEATURE (937)..(937): Xaa is Gln or Ser
  MISC_FEATURE (938)..(938): Xaa is Tyr or Val
  MISC_FEATURE (940)..(940): Xaa is Gln or Ser
  MISC_FEATURE (945)..(945): Xaa is Gln or Ser
  MISC_FEATURE (946)..(946): Xaa is Tyr or Val
  MISC_FEATURE (948)..(948): Xaa is Gln or Ser
  MISC_FEATURE (953)..(953): Xaa is Gln or Ser
  MISC_FEATURE (954)..(954): Xaa is Tyr or Val
  MISC_FEATURE (956)..(956): Xaa is Gln or Ser
  MISC_FEATURE (961)..(961): Xaa is Gln or Ser
  MISC_FEATURE (962)..(962): Xaa is Tyr or Val
  MISC_FEATURE (964)..(964): Xaa is Gln or Ser
  MISC_FEATURE (969)..(969): Xaa is Gln or Ser
  MISC_FEATURE (970)..(970): Xaa is Tyr or Val
  MISC_FEATURE (972)..(972): Xaa is Gln or Ser
  MISC_FEATURE (977)..(977): Xaa is Gln or Ser
  MISC_FEATURE (978)..(978): Xaa is Tyr or Val
  MISC_FEATURE (980)..(980): Xaa is Gln or Ser
  MISC_FEATURE (985)..(985): Xaa is Gln or Ser
  MISC_FEATURE (986)..(986): Xaa is Tyr or Val
  MISC_FEATURE (988)..(988): Xaa is Gln or Ser
  MISC_FEATURE (993)..(993): Xaa is Gln or Ser
  MISC_FEATURE (994)..(994): Xaa is Tyr or Val
  MISC_FEATURE (996)..(996): Xaa is Gln or Ser
  MISC_FEATURE (1001)..(1001): Xaa is Gln or Ser
  MISC_FEATURE (1002)..(1002): Xaa is Tyr or Val
  MISC_FEATURE (1004)..(1004): Xaa is Gln or Ser
  MISC_FEATURE (1009)..(1009): Xaa is Gln or Ser
  MISC_FEATURE (1010)..(1010): Xaa is Tyr or Val
  MISC_FEATURE (1012)..(1012): Xaa is Gln or Ser
  MISC_FEATURE (1017)..(1017): Xaa is Gln or Ser
  MISC_FEATURE (1018)..(1018): Xaa is Tyr or Val
  MISC_FEATURE (1020)..(1020): Xaa is Gln or Ser
  MISC_FEATURE (1025)..(1025): Xaa is Gln or Ser
  MISC_FEATURE (1026)..(1026): Xaa is Tyr or Val
  MISC_FEATURE (1028)..(1028): Xaa is Gln or Ser
  MISC_FEATURE (1033)..(1033): Xaa is Gln or Ser
  MISC_FEATURE (1034)..(1034): Xaa is Tyr or Val
  MISC_FEATURE (1036)..(1036): Xaa is Gln or Ser
  MISC_FEATURE (1041)..(1041): Xaa is Gln or Ser
  MISC_FEATURE (1042)..(1042): Xaa is Tyr or Val
  MISC_FEATURE (1044)..(1044): Xaa is Gln or Ser
  MISC_FEATURE (1049)..(1049): Xaa is Gln or Ser
  MISC_FEATURE (1050)..(1050): Xaa is Tyr or Val
  MISC_FEATURE (1052)..(1052): Xaa is Gln or Ser
  MISC_FEATURE (1057)..(1057): Xaa is Gln or Ser
  MISC_FEATURE (1058)..(1058): Xaa is Tyr or Val
  MISC_FEATURE (1060)..(1060): Xaa is Gln or Ser
  MISC_FEATURE (1065)..(1065): Xaa is Gln or Ser
  MISC_FEATURE (1066)..(1066): Xaa is Tyr or Val
  MISC_FEATURE (1068)..(1068): Xaa is Gln or Ser
  MISC_FEATURE (1073)..(1073): Xaa is Gln or Ser
  MISC_FEATURE (1074)..(1074): Xaa is Tyr or Val
  MISC_FEATURE (1076)..(1076): Xaa is Gln or Ser
  MISC_FEATURE (1081)..(1081): Xaa is Gln or Ser
  MISC_FEATURE (1082)..(1082): Xaa is Tyr or Val
  MISC_FEATURE (1084)..(1084): Xaa is Gln or Ser
  MISC_FEATURE (1089)..(1089): Xaa is Gln or Ser
  MISC_FEATURE (1090)..(1090): Xaa is Tyr or Val
  MISC_FEATURE (1092)..(1092): Xaa is Gln or Ser
  MISC_FEATURE (1097)..(1097): Xaa is Gln or Ser
  MISC_FEATURE (1098)..(1098): Xaa is Tyr or Val
  MISC_FEATURE (1100)..(1100): Xaa is Gln or Ser
  MISC_FEATURE (1105)..(1105): Xaa is Gln or Ser
  MISC_FEATURE (1106)..(1106): Xaa is Tyr or Val
  MISC_FEATURE (1108)..(1108): Xaa is Gln or Ser
  MISC_FEATURE (1113)..(1113): Xaa is Gln or Ser
  MISC_FEATURE (1114)..(1114): Xaa is Tyr or Val
  MISC_FEATURE (1116)..(1116): Xaa is Gln or Ser
  MISC_FEATURE (1121)..(1121): Xaa is Gln or Ser
  MISC_FEATURE (1122)..(1122): Xaa is Tyr or Val
  MISC_FEATURE (1124)..(1124): Xaa is Gln or Ser
  MISC_FEATURE (1129)..(1129): Xaa is Gln or Ser
  MISC_FEATURE (1130)..(1130): Xaa is Tyr or Val
  MISC_FEATURE (1132)..(1132): Xaa is Gln or Ser
  MISC_FEATURE (1137)..(1137): Xaa is Gln or Ser
  MISC_FEATURE (1138)..(1138): Xaa is Tyr or Val
  MISC_FEATURE (1140)..(1140): Xaa is Gln or Ser
  MISC_FEATURE (1145)..(1145): Xaa is Gln or Ser
  MISC_FEATURE (1146)..(1146): Xaa is Tyr or Val
  MISC_FEATURE (1148)..(1148): Xaa is Gln or Ser
  MISC_FEATURE (1153)..(1153): Xaa is Gln or Ser
  MISC_FEATURE (1154)..(1154): Xaa is Tyr or Val
  MISC_FEATURE (1156)..(1156): Xaa is Gln or Ser
  MISC_FEATURE (1161)..(1161): Xaa is Gln or Ser
  MISC_FEATURE (1162)..(1162): Xaa is Tyr or Val
  MISC_FEATURE (1164)..(1164): Xaa is Gln or Ser
  MISC_FEATURE (1169)..(1169): Xaa is Gln or Ser
  MISC_FEATURE (1170)..(1170): Xaa is Tyr or Val
  MISC_FEATURE (1172)..(1172): Xaa is Gln or Ser
  MISC_FEATURE (1177)..(1177): Xaa is Gln or Ser
  MISC_FEATURE (1178)..(1178): Xaa is Tyr or Val
  MISC_FEATURE (1180)..(1180): Xaa is Gln or Ser
  MISC_FEATURE (1185)..(1185): Xaa is Gln or Ser
  MISC_FEATURE (1186)..(1186): Xaa is Tyr or Val
  MISC_FEATURE (1188)..(1188): Xaa is Gln or Ser
  MISC_FEATURE (1193)..(1193): Xaa is Gln or Ser
  MISC_FEATURE (1194)..(1194): Xaa is Tyr or Val
  MISC_FEATURE (1196)..(1196): Xaa is Gln or Ser
  MISC_FEATURE (1201)..(1201): Xaa is Gln or Ser
  MISC_FEATURE (1202)..(1202): Xaa is Tyr or Val
  MISC_FEATURE (1204)..(1204): Xaa is Gln or Ser
  MISC_FEATURE (1209)..(1209): Xaa is Gln or Ser
  MISC_FEATURE (1210)..(1210): Xaa is Tyr or Val
  MISC_FEATURE (1212)..(1212): Xaa is Gln or Ser
  MISC_FEATURE (1217)..(1217): Xaa is Gln or Ser
  MISC_FEATURE (1218)..(1218): Xaa is Tyr or Val
  MISC_FEATURE (1220)..(1220): Xaa is Gln or Ser
  MISC_FEATURE (1225)..(1225): Xaa is Gln or Ser
  MISC_FEATURE (1226)..(1226): Xaa is Tyr or Val
  MISC_FEATURE (1228)..(1228): Xaa is Gln or Ser
  MISC_FEATURE (1233)..(1233): Xaa is Gln or Ser
  MISC_FEATURE (1234)..(1234): Xaa is Tyr or Val
  MISC_FEATURE (1236)..(1236): Xaa is Gln or Ser
  MISC_FEATURE (1241)..(1241): Xaa is Gln or Ser
  MISC_FEATURE (1242)..(1242): Xaa is Tyr or Val
  MISC_FEATURE (1244)..(1244): Xaa is Gln or Ser
  MISC_FEATURE (1249)..(1249): Xaa is Gln or Ser
  MISC_FEATURE (1250)..(1250): Xaa is Tyr or Val
  MISC_FEATURE (1252)..(1252): Xaa is Gln or Ser
  MISC_FEATURE (1257)..(1257): Xaa is Gln or Ser
  MISC_FEATURE (1258)..(1258): Xaa is Tyr or Val
  MISC_FEATURE (1260)..(1260): Xaa is Gln or Ser
  MISC_FEATURE (1265)..(1265): Xaa is Gln or Ser
  MISC_FEATURE (1266)..(1266): Xaa is Tyr or Val
  MISC_FEATURE (1268)..(1268): Xaa is Gln or Ser
  MISC_FEATURE (1273)..(1273): Xaa is Gln or Ser
  MISC_FEATURE (1274)..(1274): Xaa is Tyr or Val
  MISC_FEATURE (1276)..(1276): Xaa is Gln or Ser
XXPXDGRGXXPXDGRGXXPXDGRGXXPXDGRGXXPXDGRGXXPXDGRGXXPXDGRGXXPXDGRGXXPXDGRGXXPXDGRGXXPXDGRGXXPXDGRGXXPXDGRGXXPXDGRGXXPXDGRGXXPXDGRGXXPXDGRGXXPXDGRGXXPXDGRGXXPXDGRGXXPXDGRGXXPXDGRGXXPXDGRGXXPXDGRGXXPXDGRGXXPXDGRGXXPXDGRGXXPXDGRGXXPXDGRGXXPXDGRGXXPXDGRGXXPXDGRGXXPXDGRGXXPXDGRGXXPXDGRGXXPXDGRGXXPXDGRGXXPXDGRGXXPXDGRGXXPXDGRGXXPXDGRGXXPXDGRGXXPXDGRGXXPXDGRGXXPXDGRGXXPXDGRGXXPXDGRGXXPXDGRGXXPXDGRGXXPXDGRGXXPXDGRGXXPXDGRGXXPXDGRGXXPXDGRGXXPXDGRGXXPXDGRGXXPXDGRGXXPXDGRGXXPXDGRGXXPXDGRGXXPXDGRGXXPXDGRGXXPXDGRGXXPXDGRGXXPXDGRGXXPXDGRGXXPXDGRGXXPXDGRGXXPXDGRGXXPXDGRGXXPXDGRGXXPXDGRGXXPXDGRGXXPXDGRGXXPXDGRGXXPXDGRGXXPXDGRGXXPXDGRGXXPXDGRGXXPXDGRGXXPXDGRGXXPXDGRGXXPXDGRGXXPXDGRGXXPXDGRGXXPXDGRGXXPXDGRGXXPXDGRGXXPXDGRGXXPXDGRGXXPXDGRGXXPXDGRGXXPXDGRGXXPXDGRGXXPXDGRGXXPXDGRGXXPXDGRGXXPXDGRGXXPXDGRGXXPXDGRGXXPXDGRGXXPXDGRGXXPXDGRGXXPXDGRGXXPXDGRGXXPXDGRGXXPXDGRGXXPXDGRGXXPXDGRGXXPXDGRGXXPXDGRGXXPXDGRGXXPXDGRGXXPXDGRGXXPXDGRGXXPXDGRGXXPXDGRGXXPXDGRGXXPXDGRGXXPXDGRGXXPXDGRGXXPXDGRGXXPXDGRGXXPXDGRGXXPXDGRGXXPXDGRGXXPXDGRGXXPXDGRGXXPXDGRGXXPXDGRGXXPXDGRGXXPXDGRGXXPXDGRGXXPXDGRGXXPXDGRGXXPXDGRGXXPXDGRGXXPXDGRGXXPXDGRGXXPXDGRGXXPXDGRGXXPXDGRGXXPXDGRGXXPXDGRGXXPXDGRGXXPXDGRGXXPXDGRGXXPXDGRGXXPXDGRGXXPXDGRGXXPXDGRGXXPXDGRGXXPXDGRGXXPXDGRGXXPXDGRGXXPXDGRGXXPXDGRGXXPXDGRGXXPXDGRGXXPXDGRG

SEQ ID NO: 62 - protein, 365 aa, Homo Sapiens
MALLLCFVLLCGVVDFARSLSITTPEEMIEKAKGETAYLPCKFTLSPEDQGPLDIEWLISPADNQKVDQVIILYSGDKIYDDYYPDLKGRVHFTSNDLKSGDASINVTNLQLSDIGTYQCKVKKAPGVANKKIHLVVLVKPSGARCYVDGSEEIGSDFKIKCEPKEGSLPLQYEWQKLSDSQKMPTSWLAEMTSSVISVKNASSEYSGTYSCTVRNRVGSDQCLLRLNVVPPSNKAGLIAGAIIGTLLALALIGLIIFCCRKKRREEKYEKEVHHDIREDVPPPKSRTSTARSYIGSNHSSLGSMSPSNMEGYSKTQYNQVPSEDFERTPQSPTLPPAKVAAPNLSRMGAIPVMIPAQSKDGSIV

SEQ ID NO: 63 - protein, 219 aa, Homo Sapiens
MLSITTPEEMIEKAKGETAYLPCKFTLSPEDQGPLDIEWLISPADNQKVDQVIILYSGDKIYDDYYPDLKGRVHFTSNDLKSGDASINVTNLQLSDIGTYQCKVKKAPGVANKKIHLVVLVKPSGARCYVDGSEEIGSDFKIKCEPKEGSLPLQYEWQKLSDSQKMPTSWLAEMTSSVISVKNASSEYSGTYSCTVRNRVGSDQCLLRLNVVPPSNKAG

SEQ ID NO: 64 - protein, 122 aa, Homo Sapiens
MITTPEEMIEKAKGETAYLPCKFTLSPEDQGPLDIEWLISPADNQKVDQVIILYSGDKIYDDYYPDLKGRVHFTSNDLKSGDASINVTNLQLSDIGTYQCKVKKAPGVANKKIHLVVLVKPS

SEQ ID NO: 65 - protein, 116 aa, Homo Sapiens
MLSITTPEEMIEKAKGETAYLPCKFTLSPEDQGPLDIEWLISPADNQKVDQVIILYSGDKIYDDYYPDLKGRVHFTSNDLKSGDASINVTNLQLSDIGTYQCKVKKAPGVANKKIH

SEQ ID NO: 66 - protein, 89 aa, Homo Sapiens
MPSGARCYVDGSEEIGSDFKIKCEPKEGSLPLQYEWQKLSDSQKMPTSWLAEMTSSVISVKNASSEYSGTYSCTVRNRVGSDQCLLRLN

SEQ ID NO: 67 - protein, 219 aa, Homo Sapiens
MLSITTPEEMIEKAKGETAYLPCKFTLSPEDQGPLDIEWLISPADNQKVDQVGRCATSKEPYVHCQKLHRQRVHFTSNDLKSGDASINVTNLQLSDIGTYQCKVKKAPGVANKKIHLVVLVKPSGARCYVDGSEEIGSDFKIKCEPKEGSLPLQYEWQKLSDSQKMPTSWLAEMTSSVISVKNASSEYSGTYSCTVRNRVGSDQCLLRLNVVPPSNKAG

SEQ ID NO: 68 - protein, 182 aa, Homo Sapiens
MLSITTPEEMIEKAKGETAYLPCKFTLSPEDQGPLDIEWLISPADNQKVDQVGRCATSKEPYVHCQKLHRQRVHFTSNDLKSGDASINVTNLQLSDIGTYQCKVKKAPGVANKKIHLVVLGKMCHLQRAVRPLPEATSAVIIHPWGPCLLPTWKDIPRLSITKYQVKTLNALLRVRLSHLLR

SEQ ID NO: 69 - protein, 235 aa, Homo Sapiens
MLSITTPEEMIEKAKGETAYLPCKFTLSPEDQGPLDIEWLISPADNQKVDQVIILYSGDKIYDDYYPDLKGRVHFTSNDLKSGDASINVTNLQLSDIGTYQCKVKKAPGVANKKIHLVVLVKPSGARCYVDGSEEIGSDFKIKCEPKEGSLPLQYEWQKLSDSQKMPTSWLAEGKMCHLQRAVRPLPEATSAVIIHPWGPCLLPTWKDIPRLSITKYQVKTLNALLRVRLSHLLR

SEQ ID NO: 70 - protein, 178 aa, Homo Sapiens
MLSITTPEEMIEKAKGETAYLPCKFTLSPEDQGPLDIEWLISPADNQKVDQVIILYSGDKIYDDYYPDLKGRVHFTSNDLKSGDASINVTNLQLSDIGTYQCKVKKAPGVANKKIHLVVLVKPSGARCYVDGSEEIGSDFKIKCEPKEGSLPLQYEWQKLSDSQKMPTSWLAASNKAG

SEQ ID NO: 71 - protein, 24 aa, Artificial Sequence
  AdPep
MRAIVFRVQWLRRYFVNGSRSGGG

SEQ ID NO: 72 - protein, 184 aa, Artificial Sequence
  AdPep
  MISC_FEATURE (24)..(46): May be present or absent
  MISC_FEATURE (47)..(69): May be present or absent
  MISC_FEATURE (70)..(92): May be present or absent
  MISC_FEATURE (93)..(115): May be present or absent
  MISC_FEATURE (116)..(138): May be present or absent
  MISC_FEATURE (139)..(161): May be present or absent
  MISC_FEATURE (162)..(184): May be present or absent
RAIVFRVQWLRRYFVNGSRSGGGRAIVFRVQWLRRYFVNGSRSGGGRAIVFRVQWLRRYFVNGSRSGGGRAIVFRVQWLRRYFVNGSRSGGGRAIVFRVQWLRRYFVNGSRSGGGRAIVFRVQWLRRYFVNGSRSGGGRAIVFRVQWLRRYFVNGSRSGGGRAIVFRVQWLRRYFVNGSRSGGG

SEQ ID NO: 73 - protein, 860 aa, Homo Sapiens [sequence omitted]

SEQ ID NO: 74 - protein, 768 aa, Homo Sapiens
MAVGDRCERNEFQCQDGKCISYKWVCDGSAECQDGSDESQETCLSVTCKSGDFSCGGRVNRCIPQFWRCDGQVDCDNGSDEQGCPPKTCSQDEFRCHDGKCISRQFVCDSDRDCLDGSDEASCPVLTCGPASFQCNSSTCIPQLWACDNDPDCEDGSDEWPQRCRGLYVFQGDSSPCSAFEFHCLSGECIHSSWRCDGGPDCKDKSDEENCAVATCRPDEFQCSDGNCIHGSRQCDREYDCKDMSDEVGCVNVTLCEGPNKFKCHSGECITLDKVCNMARDCRDWSDEPIKECGTNECLDNNGGCSHVCNDLKIGYECLCPDGFQLVAQRRCEDIDECQDPDTCSQLCVNLEGGYKCQCEEGFQLDPHTKACKAVGSIAYLFFTNRHEVRKMTLDRSEYTSLIPNLRNVVALDTEVASNRIYWSDLSQRMICSTQLDRAHGVSSYDTVISRDIQAPDGLAVDWIHSNIYWTDSVLGTVSVADTKGVKRKTLFRENGSKPRAIVVDPVHGFMYWTDWGTPAKIKKGGLNGVDIYSLVTENIQWPNGITLDLLSGRLYWVDSKLHSISSIDVNGGNRKTILEDEKRLAHPFSLAVFEDKVFWTDIINEAIFSANRLTGSDVNLLAENLLSPEDMVLFHNLTQPRGVNWCERTTLSNGGCQYLCLPAPQINPHSPKFTCACPDGMLLARDMRSCLTEAEAAVATQETSTVRLKVSSTAVRTQHTTTRPVPDTSRLPGATPGLTTVEIVTMSHQALGDVAGRGNEKKPSSVR

SEQ ID NO: 75 - protein, 40 aa, Homo Sapiens
MSVTCKSGDFSCGGRVNRCIPQFWRCDGQVDCDNGSDEQG

SEQ ID NO: 76 - protein, 38 aa, Homo Sapiens
MTCSQDEFRCHDGKCISRQFVCDSDRDCLDGSDEASCP

SEQ ID NO: 77 - protein, 330 aa, Homo Sapiens
MSVTCKSGDFSCGGRVNRCIPQFWRCDGQVDCDNGSDEQGCPPKTCSQDEFRCHDGKCISRQFVCDSDRDCLDGSDEASCPVLTCGPASFQCNSSTCIPQLWACDNDPDCEDGSDEWPQRCRGLYVFQGDSSPCSAFEFHCLSGECIHSSWRCDGGPDCKDKSDEENCAVATCRPDEFQCSDGNCIHGSRQCDREYDCKDMSDEVGCVNVTLCEGPNKFKCHSGECITLDKVCNMARDCRDWSDEPIKECGTNECLDNNGGCSHVCNDLKIGYECLCPDGFQLVAQRRCEDIDECQDPDTCSQLCVNLEGGYKCQCEEGFQLDPHTKACK

SEQ ID NO: 78 - protein, 458 aa, Homo Sapiens
MNRGVPFRHLLLVLQLALLPAATQGKKVVLGKKGDTVELTCTASQKKSIQFHWKNSNQIKILGNQGSFLTKGPSKLNDRADSRRSLWDQGNFPLIIKNLKIEDSDTYICEVEDQKEEVQLLVFGLTANSDTHLLQGQSLTLTLESPPGSSPSVQCRSPRGKNIQGGKTLSVSQLELQDSGTWTCTVLQNQKKVEFKIDIVVLAFQKASSIVYKKEGEQVEFSFPLAFTVEKLTGSGELWWQAERASSSKSWITFDLKNKEVSVKRVTQDPKLQMGKKLPLHLTLPQALPQYAGSGNLTLALEAKTGKLHQEVNLVVMRATQLQKNLTCEVWGPTSPKLMLSLKLENKEAKVSKREKAVWVLNPEAGMWQCLLSDSGQVLLESNIKVLPTWSTPVQPMALIVLGGVAGLLLFIGLGIFFCVRCRHRRRQAERMSQIKRLLSEKKTCQCPHRFQKTCSPI

SEQ ID NO: 79 - protein, 372 aa, Homo Sapiens
MKKVVLGKKGDTVELTCTASQKKSIQFHWKNSNQIKILGNQGSFLTKGPSKLNDRADSRRSLWDQGNFPLIIKNLKIEDSDTYICEVEDQKEEVQLLVFGLTANSDTHLLQGQSLTLTLESPPGSSPSVQCRSPRGKNIQGGKTLSVSQLELQDSGTWTCTVLQNQKKVEFKIDIVVLAFQKASSIVYKKEGEQVEFSFPLAFTVEKLTGSGELWWQAERASSSKSWITFDLKNKEVSVKRVTQDPKLQMGKKLPLHLTLPQALPQYAGSGNLTLALEAKTGKLHQEVNLVVMRATQLQKNLTCEVWGPTSPKLMLSLKLENKEAKVSKREKAVWVLNPEAGMWQCLLSDSGQVLLESNIKVLPTWSTPVQP

SEQ ID NO: 80 - protein, 179 aa, Homo Sapiens
MKKVVLGKKGDTVELTCTASQKKSIQFHWKNSNQIKILGNQGSFLTKGPSKLNDRADSRRSLWDQGNFPLIIKNLKIEDSDTYICEVEDQKEEVQLLVFGLTANSDTHLLQGQSLTLTLESPPGSSPSVQCRSPRGKNIQGGKTLSVSQLELQDSGTWTCTVLQNQKKVEFKIDIVVLA

SEQ ID NO: 81 - protein, 101 aa, Homo Sapiens
MKKVVLGKKGDTVELTCTASQKKSIQFHWKNSNQIKILGNQGSFLTKGPSKLNDRADSRRSLWDQGNFPLIIKNLKIEDSDTYICEVEDQKEEVQLLVFGL

SEQ ID NO: 82 - protein, 392 aa, Homo Sapiens [sequence omitted]

SEQ ID NO: 83 - protein, 310 aa, Homo Sapiens
MCEEPPTFEAMELIGKPKPYYEIGERVDYKCKKGYFYIPPLATHTICDRNHTWLPVSDDACYRETCPYIRDPLNGQAVPANGTYEFGYQMHFICNEGYYLIGEEILYCELKGSVAIWSGKPPICEKVLCTPPPKIKNGKHTFSEVEVFEYLDAVTYSCDPAPGPDPFSLIGESTIYCGDNSVWSRAAPECKVVKCRFPVVENGKQISGFGKKFYYKATVMFECDKGFYLDGSDTIVCDSNSTWDPPVPKCLKVLPPSSTKPPALSHSVSTSSTTKSPASSASGPRPTYKPPVSNYPGYPKPEEGILDSLD

SEQ ID NO: 84 - protein, 359 aa, Homo Sapiens
MCEEPPTFEAMELIGKPKPYYEIGERVDYKCKKGYFYIPPLATHTICDRNHTWLPVSDDACYRETCPYIRDPLNGQAVPANGTYEFGYQMHFICNEGYYLIGEEILYCELKGSVAIWSGKPPICEKVLCTPPPKIKNGKHTFSEVEVFEYLDAVTYSCDPAPGPDPFSLIGESTIYCGDNSVWSRAAPECKVVKCRFPVVENGKQISGFGKKFYYKATVMFECDKGFYLDGSDTIVCDSNSTWDPPVPKCLKVLPPSSTKPPALSHSVSTSSTTKSPASSASGPRPTYKPPVSNYPGYPKPEEGILDSLDVWVIAVIVIAIVVGVAVICVVPYRYLQRRKKKGTYLTDETHREVKFTSL

SEQ ID NO: 85 - protein, 63 aa, Homo Sapiens
MCEEPPTFEAMELIGKPKPYYEIGERVDYKCKKGYFYIPPLATHTICDRNHTWLPVSDDACYR

SEQ ID NO: 86 - protein, 64 aa, Homo Sapiens
METCPYIRDPLNGQAVPANGTYEFGYQMHFICNEGYYLIGEEILYCELKGSVAIWSGKPPICEK

SEQ ID NO: 87 - protein, 67 aa, Homo Sapiens
MVLCTPPPKIKNGKHTFSEVEVFEYLDAVTYSCDPAPGPDPFSLIGESTIYCGDNSVWSRAAPECKV

SEQ ID NO: 88 - protein, 61 aa, Homo Sapiens
MVKCRFPVVENGKQISGFGKKFYYKATVMFECDKGFYLDGSDTIVCDSNSTWDPPVPKCLK

SEQ ID NO: 89 - protein, 26 aa, Homo Sapiens
MSTSSTTKSPASSASGPRPTYKPPVS

SEQ ID NO: 90 - protein, 335 aa, Homo Sapiens
MDPKGLLSLTFVLFLSLAFGASYGTGGRMMNCPKILRQLGSKVLLPLTYERINKSMNKSIHIVVTMAKSLENSVENKIVSLDPSEAGPPRYLGDRYKFYLENLTLGIRESRKEDEGWYLMTLEKNVSVQRFCLQLRLYEQVSTPEIKVLNKTQENGTCTLILGCTVEKGDHVAYSWSEKAGTHPLNPANSSHLLSLTLGPQHADNIYICTVSNPISNNSQTFSPWPGCRTDPSETKPWAVYAGLLGGVIMILIMVVILQLRRRGKTNHYQTTVEKKSLTIYAQVQKPGPLQKKLDSFPAQDPCTTIYVAATEPVPESVQETNSITVYASVTLPES

SEQ ID NO: 91 - protein, 218 aa, Homo Sapiens
MASYGTGGRMMNCPKILRQLGSKVLLPLTYERINKSMNKSIHIVVTMAKSLENSVENKIVSLDPSEAGPPRYLGDRYKFYLENLTLGIRESRKEDEGWYLMTLEKNVSVQRFCLQLRLYEQVSTPEIKVLNKTQENGTCTLILGCTVEKGDHVAYSWSEKAGTHPLNPANSSHLLSLTLGPQHADNIYICTVSNPISNNSQTFSPWPGCRTDPSETKP

SEQ ID NO: 92 - protein, 213 aa, Homo Sapiens
ASYGTGGRMMNCPKILRQLGSKVLLPLTYERINKSMNKSIHIVVTMAKSLENSVENKIVSLDPSEAGPPRYLGDRYKFYLENLTLGIRESRKEDEGWYLMTLEKNVSVQRFCLQLRLYEQVSTPEIKVLNKTQENGTCTLILGCTVEKGDHVAYSWSEKAGTHPLNPANSSHLLSLTLGPQHADNIYICTVSNPISNNSQTFSPWPGCRTDPS

SEQ ID NO: 93 - protein, 510 aa, Homo Sapiens
MPLSLGAEMWGPEAWLLLLLLLASFTGRCPAGELETSDVVTVVLGQDAKLPCFYRGDSGEQVGQVAWARVDAGEGAQELALLHSKYGLHVSPAYEGRVEQPPPPRNPLDGSVLLRNAVQADEGEYECRVSTFPAGSFQARLRLRVLVPPLPSLNPGPALEEGQGLTLAASCTAEGSPAPSVTWDTEVKGTTSSRSFKHSRSAAVTSEFHLVPSRSMNGQPLTCVVSHPGLLQDQRITHILHVSFLAEASVRGLEDQNLWHIGREGAMLKCLSEGQPPPSYNWTRLDGPLPSGVRVDGDTLGFPPLTTEHSGIYVCHVSNEFSSRDSQVTVDVLDPQEDSGKQVDLVSASVVVVGVIAALLFCLLVVVVVLMSRYHRRKAQQMTQKYEEELTLTRENSIRRLHSHHTDPRSQPEESVGLRAEGHPDSLKDNSSCSVMSEEPEGRSYSTLTTVREIETQTELLSPGSGRAEEEEDQDEGIKQAMNHFVQENGTLRAKPTGNGIYINGRGHLV

SEQ ID NO: 94 - protein, 319 aa, Homo Sapiens
MGELETSDVVTVVLGQDAKLPCFYRGDSGEQVGQVAWARVDAGEGAQELALLHSKYGLHVSPAYEGRVEQPPPPRNPLDGSVLLRNAVQADEGEYECRVSTFPAGSFQARLRLRVLVPPLPSLNPGPALEEGQGLTLAASCTAEGSPAPSVTWDTEVKGTTSSRSFKHSRSAAVTSEFHLVPSRSMNGQPLTCVVSHPGLLQDQRITHILHVSFLAEASVRGLEDQNLWHIGREGAMLKCLSEGQPPPSYNWTRLDGPLPSGVRVDGDTLGFPPLTTEHSGIYVCHVSNEFSSRDSQVTVDVLDPQEDSGKQVDLVSAS

SEQ ID NO: 95 - protein, 113 aa, Homo Sapiens
GELETSDVVTVVLGQDAKLPCFYRGDSGEQVGQVAWARVDAGEGAQELALLHSKYGLHVSPAYEGRVEQPPPPRNPLDGSVLLRNAVQADEGEYECRVSTFPAGSFQARLRLR

SEQ ID NO: 96 - protein, 91 aa, Homo Sapiens
MPPLPSLNPGPALEEGQGLTLAASCTAEGSPAPSVTWDTEVKGTTSSRSFKHSRSAAVTSEFHLVPSRSMNGQPLTCVVSHPGLLQDQRIT

SEQ ID NO: 97 - protein, 85 aa, Homo Sapiens
MASVRGLEDQNLWHIGREGAMLKCLSEGQPPPSYNWTRLDGPLPSGVRVDGDTLGFPPLTTEHSGIYVCHVSNEFSSRDSQVTVD

SEQ ID NO: 98 - protein, 288 aa, Homo Sapiens
MGHTRRQGTSPSKCPYLNFFQLLVLAGLSHFCSGVIHVTKEVKEVATLSCGHNVSVEELAQTRIYWQKEKKMVLTMMSGDMNIWPEYKNRTIFDITNNLSIVILALRPSDEGTYECVVLKYEKDAFKREHLAEVTLSVKADFPTPSISDFEIPTSNIRRIICSTSGGFPEPHLSWLENGEELNAINTTVSQDPETELYAVSSKLDFNMTTNHSFMCLIKYGHLRVNQTFNWNTTKQEHFPDNLLPSWAITLISVNGIFVICCLTYCFAPRCRERRRNERLRRESVRPV

SEQ ID NO: 99 - protein, 209 aa, Homo Sapiens
MVIHVTKEVKEVATLSCGHNVSVEELAQTRIYWQKEKKMVLTMMSGDMNIWPEYKNRTIFDITNNLSIVILALRPSDEGTYECVVLKYEKDAFKREHLAEVTLSVKADFPTPSISDFEIPTSNIRRIICSTSGGFPEPHLSWLENGEELNAINTTVSQDPETELYAVSSKLDFNMTTNHSFMCLIKYGHLRVNQTFNWNTTKQEHFPDN

SEQ ID NO: 100 - protein, 201 aa, Homo Sapiens
MVIHVTKEVKEVATLSCGHNVSVEELAQTRIYWQKEKKMVLTMMSGDMNIWPEYKNRTIFDITNNLSIVILALRPSDEGTYECVVLKYEKDAFKREHLAEVTLSVKADFPTPSISDFEIPTSNIRRIICSTSGGFPEPHLSWLENGEELNAINTTVSQDPETELYAVSSKLDFNMTTNHSFMCLIKYGHLRVNQTFNWNTT

SEQ ID NO: 101 - protein, 329 aa, Homo Sapiens
MDPQCTMGLSNILFVMAFLLSGAAPLKIQAYFNETADLPCQFANSQNQSLSELVVFWQDQENLVLNEVYLGKEKFDSVHSKYMGRTSFDSDSWTLRLHNLQIKDKGLYQCIIHHKKPTGMIRIHQMNSELSVLANFSQPEIVPISNITENVYINLTCSSIHGYPEPKKMSVLLRTKNSTIEYDGVMQKSQDNVTELYDVSISLSVSFPDVTSNMTIFCILETDKTRLLSSPFSIELEDPQPPPDHIPWITAVLPTVIICVMVFCLILWKWKKKKRPRNSYKCGTNTMEREESEQTKKREKIHIPERSDEAQRVFKSSKTSSCDKSDTCF

SEQ ID NO: 102 - protein, 225 aa, Homo Sapiens
MAPLKIQAYFNETADLPCQFANSQNQSLSELVVFWQDQENLVLNEVYLGKEKFDSVHSKYMGRTSFDSDSWTLRLHNLQIKDKGLYQCIIHHKKPTGMIRIHQMNSELSVLANFSQPEIVPISNITENVYINLTCSSIHGYPEPKKMSVLLRTKNSTIEYDGVMQKSQDNVTELYDVSISLSVSFPDVTSNMTIFCILETDKTRLLSSPFSIELEDPQPPPDHIP

SEQ ID NO: 103 - protein, 154 aa, Homo Sapiens
MYMGRTSFDSDSWTLRLHNLQIKDKGLYQCIIHHKKPTGMIRIHQMNSELSVLANFSQPEIVPISNITENVYINLTCSSIHGYPEPKKMSVLLRTKNSTIEYDGVMQKSQDNVTELYDVSISLSVSFPDVTSNMTIFCILETDKTRLLSSPFSI

SEQ ID NO: 104 - protein, 116 aa, Homo Sapiens
MLANFSQPEIVPISNITENVYINLTCSSIHGYPEPKKMSVLLRTKNSTIEYDGVMQKSQDNVTELYDVSISLSVSFPDVTSNMTIFCILETDKTRLLSSPFSIELEDPQPPPDHIP

SEQ ID NO: 105 - protein, 541 aa, Homo Sapiens
MVADPPRDSKGLAAAEPTANGGLALASIEDQGAAAGGYCGSRDQVRRCLRANLLVLLTVVAVVAGVALGLGVSGAGGALALGPERLSAFVFPGELLLRLLRMIILPLVVCSLIGGAASLDPGALGRLGAWALLFFLVTTLLASALGVGLALALQPGAASAAINASVGAAGSAENAPSKEVLDSFLDLARNIFPSNLVSAAFRSYSTTYEERNITGTRVKVPVGQEVEGMNILGLVVFAIVFGVALRKLGPEGELLIRFFNSFNEATMVLVSWIMWYAPVGIMFLVAGKIVEMEDVGLLFARLGKYILCCLLGHAIHGLLVLPLIYFLFTRKNPYRFLWGIVTPLATAFGTSSSSATLPLMMKCVEENNGVAKHISRFILPIGATVNMDGAALFQCVAAVFIAQLSQQSLDFVKIITILVTATASSVGAAGIPAGGVLTLAIILEAVNLPVDHISLILAVDWLVDRSCTVLNVEGDALGAGLLQNYVDRTESRSTEPELIQVKSELPLDPLPVPTEEGNPLLKHYRGPAGDATVASEKESVM

SEQ ID NO: 106 - protein, 14 aa, Homo Sapiens
MGPERLSAFVFPGE

SEQ ID NO: 107 - protein, 72 aa, Homo Sapiens
MQPGAASAAINASVGAAGSAENAPSKEVLDSFLDLARNIFPSNLVSAAFRSYSTTYEERNITGTRVKVPVGQ

SEQ ID NO: 108 - protein, 22 aa, Homo Sapiens
MAGKIVEMEDVGLLFARLGKYI

SEQ ID NO: 109 - protein, 14 aa, Homo Sapiens
MIAQLSQQSLDFVK

SEQ ID NO: 110 - protein, 14 aa, Homo Sapiens
MLPVDHISLILAVD

SEQ ID NO: 111 - protein, 532 aa, Homo Sapiens
MEKSNETNGYLDSAQAGPAAGPGAPGTAAGRARRCAGFLRRQALVLLTVSGVLAGAGLGAALRGLSLSRTQVTYLAFPGEMLLRMLRMIILPLVVCSLVSGAASLDASCLGRLGGIAVAYFGLTTLSASALAVALAFIIKPGSGAQTLQSSDLGLEDSGPPPVPKETVDSFLDLARNLFPSNLVVAAFRTYATDYKVVTQNSSSGNVTHEKIPIGTEIEGMNILGLVLFALVLGVALKKLGSEGEDLIRFFNSLNEATMVLVSWIMWYVPVGIMFLVGSKIVEMKDIIVLVTSLGKYIFASILGHVIHGGIVLPLIYFVFTRKNPFRFLLGLLAPFATAFATCSSSATLPSMMKCIEENNGVDKRISRFILPIGATVNMDGAAIFQCVAAVFIAQLNNVELNAGQIFTILVTATASSVGAAGVPAGGVLTIAIILEAIGLPTHDLPLILAVDWIVDRTTTVVNVEGDALGAGILHHLNQKATKKGEQELAEVKVEAIPNCKSEEETSPLVTHQNPAGPVASAPELESKESVL

SEQ ID NO: 112 - protein, 78 aa, Homo Sapiens
MKPGSGAQTLQSSDLGLEDSGPPPVPKETVDSFLDLARNLFPSNLVVAAFRTYATDYKVVTQNSSSGNVTHEKIPIGT

SEQ ID NO: 113 - protein, 46 aa, Homo Sapiens
MNILGLVLFALVLGVALKKLGSEGEDLIRFFNSLNEATMVLVSWIM

SEQ ID NO: 114 - protein, 333 aa, Homo Sapiens
MAVRRDSVWKYCWGVLMVLCRTAISKSIVLEPIYWNSSNSKFLPGQGLVLYPQIGDKLDIICPKVDSKTVGQYEYYKVYMVDKDQADRCTIKKENTPLLNCAKPDQDIKFTIKFQEFSPNLWGLEFQKNKDYYIISTSNGSLEGLDNQEGGVCQTRAMKILMKVGQDASSAGSTRNKDPTRRPELEAGTNGRSSTTSPFVKPNPGSSTDGNSAGHSGNNILGSEVALFAGIASGCIIFIVIIITLVVLLLKYRRRHRKHSPQHTTTLSLSTLATPKRSGNNNGSEPSDIIIPLRTADSVFCPHYEKVSGDYGHPVYIVQEMPPQSPANIYYKV

SEQ ID NO: 115 - protein, 203 aa, Homo Sapiens
MIVLEPIYWNSSNSKFLPGQGLVLYPQIGDKLDIICPKVDSKTVGQYEYYKVYMVDKDQADRCTIKKENTPLLNCAKPDQDIKFTIKFQEFSPNLWGLEFQKNKDYYIISTSNGSLEGLDNQEGGVCQTRAMKILMKVGQDASSAGSTRNKDPTRRPELEAGTNGRSSTTSPFVKPNPGSSTDGNSAGHSGNNILGSEVALFA

SEQ ID NO: 116 - protein, 679 aa, Homo Sapiens
MATLITSTTAATAASGPLVDYLWMLILGFIIAFVLAFSVGANDVANSFGTAVGSGVVTLKQACILASIFETVGSVLLGAKVSETIRKGLIDVEMYNSTQGLLMAGSVSAMFGSAVWQLVASFLKLPISGTHCIVGATIGFSLVAKGQEGVKWSELIKIVMSWFVSPLLSGIMSGILFFLVRAFILHKADPVPNGLRALPVFYACTVGINLFSIMYTGAPLLGFDKLPLWGTILISVGCAVFCALIVWFFVCPRMKRKIEREIKCSPSESPLMEKKNSLKEDHEETKLSVGDIENKHPVSEVGPATVPLQAVVEERTVSFKLGDLEEAPERERLPSVDLKEETSIDSTVNGAVQLPNGNLVQFSQAVSNQINSSGHYQYHTVHKDSGLYKELLHKLHLAKVGDCMGDSGDKPLRRNNSYTSYTMAICGMPLDSFRAKEGEQKGEEMEKLTWPNADSKKRIRMDSYTSYCNAVSDLHSASEIDMSVKAEMGLGDRKGSNGSLEEWYDQDKPEVSLLFQFLQILTACFGSFAHGGNDVSNAIGPLVALYLVYDTGDVSSKVATPIWLLLYGGVGICVGLWVWGRRVIQTMGKDLTPITPSSGFSIELASALTVVIASNIGLPISTTHCKVGSVVSVGWLRSKKAVDWRLFRNIFMAWFVTVPISGVISAAIMAIFRYVILRM

SEQ ID NO: 117 - protein, 28 aa, Homo Sapiens
MGNDVSNAIGPLVALYLVYDTGDVSSKV

SEQ ID NO: 118 - protein, 10 aa, Homo Sapiens
MIFRYVILRM

SEQ ID NO: 119 - protein, 652 aa, Homo Sapiens
MAMDEYLWMVILGFIIAFILAFSVGANDVANSFGTAVGSGVVTLRQACILASIFETTGSVLLGAKVGETIRKGIIDVNLYNETVETLMAGEVSAMVGSAVWQLIASFLRLPISGTHCIVGSTIGFSLVAIGTKGVQWMELVKIVASWFISPLLSGFMSGLLFVLIRIFILKKEDPVPNGLRALPVFYAATIAINVFSIMYTGAPVLGLVLPMWAIALISFGVALLFAFFVWLFVCPWMRRKITGKLQKEGALSRVSDESLSKVQEAESPVFKELPGAKANDDSTIPLTGAAGETLGTSEGTSAGSHPRAAYGRALSMTHGSVKSPISNGTFGFDGHTRSDGHVYHTVHKDSGLYKDLLHKIHIDRGPEEKPAQESNYRLLRRNNSYTCYTAAICGLPVHATFRAADSSAPEDSEKLVGDTVSYSKKRLRYDSYSSYCNAVAEAEIEAEEGGVEMKLASELADPDQPREDPAEEEKEEKDAPEVHLLFHFLQVLTACFGSFAHGGNDVSNAIGPLVALWLIYKQGGVTQEAATPVWLLFYGGVGICTGLWVWGRRVIQTMGKDLTPITPSSGFTIELASAFTVVIASNIGLPVSTTHCKVGSVVAVGWIRSRKAVDWRLFRNIFVAWFVTVPVAGLFSAAVMALLMYGILPYV

SEQ ID NO: 120 - protein, 28 aa, Homo Sapiens
MGNDVSNAIGPLVALWLIYKQGGVTQEA

SEQ ID NO: 121 - protein, 805 aa, Homo Sapiens [sequence omitted]

SEQ ID NO: 122 - protein, 724 aa, Homo Sapiens
MQSTIEEQAKTFLDKFNHEAEDLFYQSSLASWNYNTNITEENVQNMNNAGDKWSAFLKEQSTLAQMYPLQEIQNLTVKLQLQALQQNGSSVLSEDKSKRLNTILNTMSTIYSTGKVCNPDNPQECLLLEPGLNEIMANSLDYNERLWAWESWRSEVGKQLRPLYEEYVVLKNEMARANHYEDYGDYWRGDYEVNGVDGYDYSRGQLIEDVEHTFEEIKPLYEHLHAYVRAKLMNAYPSYISPIGCLPAHLLGDMWGRFWTNLYSLTVPFGQKPNIDVTDAMVDQAWDAQRIFKEAEKFFVSVGLPNMTQGFWENSMLTDPGNVQKAVCHPTAWDLGKGDFRILMCTKVTMDDFLTAHHEMGHIQYDMAYAAQPFLLRNGANEGFHEAVGEIMSLSAATPKHLKSIGLLSPDFQEDNETEINFLLKQALTIVGTLPFTYMLEKWRWMVFKGEIPKDQWMKKWWEMKREIVGVVEPVPHDETYCDPASLFHVSNDYSFIRYYTRTLYQFQFQEALCQAAKHEGPLHKCDISNSTEAGQKLFNMLRLGKSEPWTLALENVVGAKNMNVRPLLNYFEPLFTWLKDQNKNSFVGWSTDWSPYADQSIKVRISLKSALGDKAYEWNDNEMYLFRSSVAYAMRQYFLKVKNQMILFGEEDVRVANLKPRISFNFFVTAPKNVSDIIPRTEVEKAIRMSRSRINDAFRLNDNSLEFLGIQPTLGPPNQPPVS

SEQ ID NO: 123 - protein, 598 aa, Homo Sapiens
MSTIEEQAKTFLDKFNHEAEDLFYQSSLASWNYNTNITEENVQNMNNAGDKWSAFLKEQSTLAQMYPLQEIQNLTVKLQLQALQQNGSSVLSEDKSKRLNTILNTMSTIYSTGKVCNPDNPQECLLLEPGLNEIMANSLDYNERLWAWESWRSEVGKQLRPLYEEYVVLKNEMARANHYEDYGDYWRGDYEVNGVDGYDYSRGQLIEDVEHTFEEIKPLYEHLHAYVRAKLMNAYPSYISPIGCLPAHLLGDMWGRFWTNLYSLTVPFGQKPNIDVTDAMVDQAWDAQRIFKEAEKFFVSVGLPNMTQGFWENSMLTDPGNVQKAVCHPTAWDLGKGDFRILMCTKVTMDDFLTAHHEMGHIQYDMAYAAQPFLLRNGANEGFHEAVGEIMSLSAATPKHLKSIGLLSPDFQEDNETEINFLLKQALTIVGTLPFTYMLEKWRWMVFKGEIPKDQWMKKWWEMKREIVGVVEPVPHDETYCDPASLFHVSNDYSFIRYYTRTLYQFQFQEALCQAAKHEGPLHKCDISNSTEAGQKLFNMLRLGKSEPWTLALENVVGAKNMNVRPLLNYFEPLFTWLKDQNKNSFVGWSTDWSPYAD

SEQ ID NO: 124 - protein, 102 aa, Homo Sapiens
MSTIEEQAKTFLDKFNHEAEDLFYQSSLASWNYNTNITEENVQNMNNAGDKWSAFLKEQSTLAQMYPLQEIQNLTVKLQLQALQQNGSSVLSEDKSKRLNTI

SEQ ID NO: 125 - protein, 48 aa, Artificial Sequence
  Albumin-binding polypeptide
MLAEAKVLANRELDKYGVSDFYKRLINKAKTVEGVEALKLHLLAALPG

SEQ ID NO: 126 - protein, 253 aa, Staphylococcus aureus
MAAQHDEAQQNAFYQVLNMPNLNADQRNGFIQSLKDDPSQSANVLGEAKKLNESQAPKADNNFNKEQQNAFYEILNMPNLNEEQRNGFIQSLKDDPSQSANLLSEAKKLNESQAPKADNKFNKEQQNAFYEILHLPNLNEEQRNGFIQSLKDDPSQSANLLAEAKKLNDAQAPKADNKFNKEQQNAFYEILHLPNLTEEQRNGFIQSLKDDPSVSKEILAEAKKLNDAQAPKEEDNNKPGKEDGNKPGKEDGN

SEQ ID NO: 127 - protein, 59 aa, Staphylococcus aureus
MADNKFNKEQQNAFYEILHLPNLNEEQRNGFIQSLKDDPSQSANLLAEAKKLNDAQAPK

SEQ ID NO: 128 - protein, 59 aa, Staphylococcus aureus
MADNKFNKEQQNAFYEILHLPNLTEEQRNGFIQSLKDDPSVSKEILAEAKKLNDAQAPK

SEQ ID NO: 129 - protein, 992 aa, Finegoldia magna
MKINKKLLMAALAGAIVVGGGANAYAAEEDNTDNNLSMDEISDAYFDYHGDVSDSVDPVEEEIDEALAKALAEAKETAKKHIDSLNHLSETAKKLAKNDIDSATTINAINDIVARADVMERKTAEKEEAEKLAAAKETAKKHIDELKHLADKTKELAKRDIDSATTINAINDIVARADVMERKTAEKEEAEKLAAAKETAKKHIDELKHLADKTKELAKRDIDSATTIDAINDIVARADVMERKLSEKETPEPEEEVTIKANLIFADGSTQNAEFKGTFAKAVSDAYAYADALKKDNGEYTVDVADKGLTLNIKFAGKKEKPEEPKEEVTIKVNLIFADGKTQTAEFKGTFEEATAKAYAYADLLAKENGEYTADLEDGGNTINIKFAGKETPETPEEPKEEVTIKVNLIFADGKIQTAEFKGTFEEATAKAYAYANLLAKENGEYTADLEDGGNTINIKFAGKETPETPEEPKEEVTIKVNLIFADGKTQTAEFKGTFEEATAEAYRYADLLAKVNGEYTADLEDGGYTINIKFAGKEQPGENPGITIDEWLLKNAKEEAIKELKEAGITSDLYFSLINKAKTVEGVEALKNEILKAHAGEETPELKDGYATYEEAEAAAKEALKNDDVNNAYEIVQGADGRYYYVLKIEVADEEEPGEDTPEVQEGYATYEEAEAAAKEALKEDKVNNAYEVVQGADGRYYYVLKIEDKEDEQPGEEPGENPGITIDEWLLKNAKEDAIKELKEAGISSDIYFDAINKAKTVEGVEALKNEILKAHAEKPGENPGITIDEWLLKNAKEAAIKELKEAGITAEYLFNLINKAKTVEGVESLKNEILKAHAEKPGENPGITIDEWLLKNAKEDAIKELKEAGITSDIYFDAINKAKTIEGVEALKNEILKAHKKDEEPGKKPGEDKKPEDKKPGEDKKPEDKKPGEDKKPEDKKPGKTDKDSPNKKKKAKLPKAGSEAEILTLAAAALSTAAGAYVSLKKRK

SEQ ID NO: 130 - protein, 75 aa, Finegoldia magna
MKEEVTIKVNLIFADGKTQTAEFKGTFEEATAKAYAYADLLAKENGEYTADLEDGGNTINIKFAGKETPETPEEP

SEQ ID NO: 131 - protein, 593 aa, Unknown
  Streptococcus sp. group G
MEKEKKVKYFLRKSAFGLASVSAAFLVGSTVFAVDSPIEDTPIIRNGGELTNLLGNSETTLALRNEESATADLTAAAVADTVAAAAAENAGAAAWEAAAAADALAKAKADALKEFNKYGVSDYYKNLINNAKTVEGVKDLQAQVVESAKKARISEATDGLSDFLKSQTPAEDTVKSIELAEAKVLANRELDKYGVSDYHKNLINNAKTVEGVKDLQAQVVESAKKARISEATDGLSDFLKSQTPAEDTVKSIELAEAKVLANRELDKYGVSDYYKNLINNAKTVEGVKALIDEILAALPKTDTYKLILNGKTLKGETTTEAVDAATAEKVFKQYANDNGVDGEWTYDDATKTFTVTEKPEVIDASELTPAVTTYKLVINGKTLKGETTTEAVDAATAEKVFKQYANDNGVDGEWTYDDATKTFTVTEKPEVIDASELTPAVTTYKLVINGKTLKGETTTKAVDAETAEKAFKQYANDNGVDGVWTYDDATKTFTVTEMVTEVPGDAPTEPEKPEASIPLVPLTPATPIAKDDAKKDDTKKEDAKKPEAKKEDAKKAETLPTTGEGSNPFFTAAALAVMAGAGALAVASKRKED

SEQ ID NO: 132 - protein, 530 aa, Unknown
  Streptococcus sp. group G
MVDSPIEDTPIIRNGGELTNLLGNSETTLALRNEESATADLTAAAVADTVAAAAAENAGAAAWEAAAAADALAKAKADALKEFNKYGVSDYYKNLINNAKTVEGVKDLQAQVVESAKKARISEATDGLSDFLKSQTPAEDTVKSIELAEAKVLANRELDKYGVSDYHKNLINNAKTVEGVKDLQAQVVESAKKARISEATDGLSDFLKSQTPAEDTVKSIELAEAKVLANRELDKYGVSDYYKNLINNAKTVEGVKALIDEILAALPKTDTYKLILNGKTLKGETTTEAVDAATAEKVFKQYANDNGVDGEWTYDDATKTFTVTEKPEVIDASELTPAVTTYKLVINGKTLKGETTTEAVDAATAEKVFKQYANDNGVDGEWTYDDATKTFTVTEKPEVIDASELTPAVTTYKLVINGKTLKGETTTKAVDAETAEKAFKQYANDNGVDGVWTYDDATKTFTVTEMVTEVPGDAPTEPEKPEASIPLVPLTPATPIAKDDAKKDDTKKEDAKKPEAKKEDAKKAETLPTT

SEQ ID NO: 133 - protein, 72 aa, Unknown
  Streptococcus sp. group G
TYKLILNGKTLKGETTTEAVDAATAEKVFKQYANDNGVDGEWTYDDATKTFTVTEKPEVIDASELTPAVTTY

SEQ ID NO: 134 - protein, 494 aa, Homo Sapiens
MSTTLLSAFYDVDFLCKTEKSLANLNLNNMLDKKAVGTPVAAAPSSGFAPGFLRRHSASNLHALAHPAPSPGSCSPKFPGAANGSSCGSAAAGGPTSYGTLKEPSGGGGTALLNKENKFRDRSFSENGDRSQHLLHLQQQQKGGGGSQINSTRYKTELCRPFEESGTCKYGEKCQFAHGFHELRSLTRHPKYKTELCRTFHTIGFCPYGPRCHFIHNADERRPAPSGGASGDLRAFGTRDALHLGFPREPRPKLHHSLSFSGFPSGHHQPPGGLESPLLLDSPTSRTPPPPSCSSASSCSSSASSCSSASAASTPSGAPTCCASAAAAAAAALLYGTGGAEDLLAPGAPCAACSSASCANNAFAFGPELSSLITPLAIQTHNFAAVAAAAYYRSQQQQQQQGLAPPAQPPAPPSATLPAGAAAPPSPPFSFQLPRRLSDSPVFDAPPSPPDSLSDRDSYLSGSLSSGSLSGSESPSLDPGRRLPIFSRLSISDD

SEQ ID NO: 135 - protein, 71 aa, Homo Sapiens
MSTRYKTELCRPFEESGTCKYGEKCQFAHGFHELRSLTRHPKYKTELCRTFHTIGFCPYGPRCHFIHNADE

SEQ ID NO: 136 - protein, 43 aa, Homo Sapiens
MYGEKCQFAHGFHELRSLTRHPKYKTELCRTFHTIGFCPYGPR

SEQ ID NO: 137 - protein, 217 aa, Homo Sapiens [sequence omitted]

SEQ ID NO: 138 - protein, 183 aa, Homo Sapiens
MKHPLQNRWALWFFKNDKSKTWQANLRLISKFDTVEDFWALYNHIQLSSNLMPGCDYSLFKDGIEPMWEDEKNKRGGRWLITLNKQQRRSDLDRFWLETLLCLIGESFDDYSDDVCGAVVNVRAKGDKIAIWTTECENREAVTHIGRVYKERLGLPPKIVIGYQSHADTATKSGSTTKNRFVV

SEQ ID NO: 139 - protein, 636 aa, Homo Sapiens
MNPSAPSYPMASLYVGDLHPDVTEAMLYEKFSPAGPILSIRVCRDMITRRSLGYAYVNFQQPADAERALDTMNFDVIKGKPVRIMWSQRDPSLRKSGVGNIFIKNLDKSIDNKALYDTFSAFGNILSCKVVCDENGSKGYGFVHFETQEAAERAIEKMNGMLLNDRKVFVGRFKSRKEREAELGARAKEFTNVYIKNFGEDMDDERLKDLFGKFGPALSVKVMTDESGKSKGFGFVSFERHEDAQKAVDEMNGKELNGKQIYVGRAQKKVERQTELKRKFEQMKQDRITRYQGVNLYVKNLDDGIDDERLRKEFSPFGTITSAKVMMEGGRSKGFGFVCFSSPEEATKAVTEMNGRIVATKPLYVALAQRKEERQAHLTNQYMQRMASVRAVPNPVINPYQPAPPSGYFMAAIPQTQNRAAYYPPSQIAQLRPSPRWTAQGARPHPFQNMPGAIRPAAPRPPFSTMRPASSQVPRVMSTQRVANTSTQTMGPRPAAAAAAATPAVRTVPQYKYAAGVRNPQQHLNAQPQVTMQQPAVHVQGQEPLTASMLASAPPQEQKQMLGERLFPLIQAMHPTLAGKITGMLLEIDNSELLHMLESPESLRSKVDEAVAVLQAHQAKEAAQKAVNSATGVPTV

SEQ ID NO: 140 - protein, 174 aa, Homo Sapiens
MSYPMASLYVGDLHPDVTEAMLYEKFSPAGPILSIRVCRDMITRRSLGYAYVNFQQPADAERALDTMNFDVIKGKPVRIMWSQRDPSLRKSGVGNIFIKNLDKSIDNKALYDTFSAFGNILSCKVVCDENGSKGYGFVHFETQEAAERAIEKMNGMLLNDRKVFVGRFKSRKER

SEQ ID NO: 141 - protein, 80 aa, Homo Sapiens
MASLYVGDLHPDVTEAMLYEKFSPAGPILSIRVCRDMITRRSLGYAYVNFQQPADAERALDTMNFDVIKGKPVRIMWSQR

SEQ ID NO: 142 - protein, 78 aa, Homo Sapiens
MGNIFIKNLDKSIDNKALYDTFSAFGNILSCKVVCDENGSKGYGFVHFETQEAAERAIEKMNGMLLNDRKVFVGRFKS

SEQ ID NO: 143 - protein, 79 aa, Homo Sapiens
MTNVYIKNFGEDMDDERLKDLFGKFGPALSVKVMTDESGKSKGFGFVSFERHEDAQKAVDEMNGKELNGKQIYVGRAQK

SEQ ID NO: 144 - protein, 78 aa, Homo Sapiens
MVNLYVKNLDDGIDDERLRKEFSPFGTITSAKVMMEGGRSKGFGFVCFSSPEEATKAVTEMNGRIVATKPLYVALAQR

SEQ ID NO: 145 - protein, 429 aa, Homo Sapiens
MAQAPADPGREGHLEQRILQVLTEAGSPVKLAQLVKECQAPKRELNQVLYRMKKELKVSLTSPATWCLGGTDPEGEGPAELALSSPAERPQQHAATIPETPGPQFSQQREEDIYRFLKDNGPQRALVIAQALGMRTAKDVNRDLYRMKSRHLLDMDEQSKAWTIYRPEDSGRRAKSASIIYQHNPINMICQNGPNSWISIANSEAIQIGHGNIITRQTVSREDGSAGPRHLPSMAPGDSSTWGTLVDPWGPQDIHMEQSILRRVQLGHSNEMRLHGVPSEGPAHIPPGSPPVSATAAGPEASFEARIPSPGTHPEGEAAQRIHMKSCFLEDATIGNSNKMSISPGVAGPGGVAGSGEGEPGEDAGRRPADTQSRSHFPRDIGQPITPSHSKLTPKLETMTLGNRSHKAAEGSHYVDEASHEGSWWGGGI

SEQ ID NO: 146 - protein, 64 aa, Homo Sapiens
MPGREGHLEQRILQVLTEAGSPVKLAQLVKECQAPKRELNQVLYRMKKELKVSLTSPATWCLGG

SEQ ID NO: 147 - protein, 65 aa, Homo Sapiens
MPQFSQQREEDIYRFLKDNGPQRALVIAQALGMRTAKDVNRDLYRMKSRHLLDMDEQSKAWTIYR

SEQ ID NO: 148 - protein, 991 aa, Capsella rubella
MHRGNEDLSFGDDYEKEIGLLLGEQQRRQEEADEIEKELNLYRSGSAPPTVDGSVNAAGGLFNGGGRGPFMEFGGGNKGNGFGGDDDELRKDPAYLSYYYANMKLNPRLPPPLMSREDLRVAQRLKGSSNVLGGVGDRRNVNESRSLFSMPPGFDQMNEFEAEKTNASSSEWDANGLIGLPGLGLGGKQKSFADIFQPDMGHPVSQQPSRPASRNAFDENVDSTNNQSPSASQGIGAPPPYSYAAVLGSSLSRNGTPDPQAVARVPSPCLTPIGSGRVSSNDKRNTSNQSPFNGVTSGLNESSDLVNALSGMNLSGSGGLDDRGQAEQDVEKVRNYMFGFQGGHNEVSQHVFPNKSDQAQKATGSLRNLHMRGSQGSAYNGGGLANPYQHLDSPNYCLNNYALNPAVASVMANQLGNSNFSPMYDNYSAASALGFSGMDSRLHGGGFESRNLGRSNRMMGGGGLQSHMADPMYHQYGRYSENVDALDLLNDPAMDRSFMGNSYMNMLELQRAYLGAQKSQYGVPYKSGSPNSHSYYGSPTFGSNMSYPGSPLAHHAMQNSLMSPCSPMRRGEVNMRYPSATRNYSGGVMGSWHMDASLDEGFGSSLLEEFKSNKTRGFELSEIAGHVVEFSADQYGSRFIQQKLETATTDEKNMVYEEIMPHALALMTDVFGNYVIQKFFEHGLPPQRRELGDKLFENVLPLSLQMYGCRVIQKAIEVVDLDQKIKMVKELDGHVMRCVRDQNGNHVVQKCIECVPEENIEFIISTFFGHVVSLSTHPYGCRVIQRVLEHCHDPDTQSKVMEEILSTVSMLAQDQYGNYVVQHVLEHGKPDERTVIIKELAGKIVQMSQQKFASNVVEKCLTFGGPEERELLVNEMLGTTDENEPLQAMMKDQFANYVVQKVLETCDDQQRELILTRIKVHLNALKKYTYGKHVVARIEKLVAAGGMHMFLLFPLGLKEENGFAVPNPASDVVRPQVLYSLTRVDGSAIAF

SEQ ID NO: 149 - protein, 320 aa, Artificial Sequence
  Elastin-like polypeptide
GRGDQPYQGRGDQPYQGRGDQPYQGRGDQPYQGRGDQPYQGRGDQPYQGRGDQPYQGRGDQPYQGRGDQPYQGRGDQPYQGRGDQPYQGRGDQPYQGRGDQPYQGRGDQPYQGRGDQPYQGRGDQPYQGRGDQPYQGRGDQPYQGRGDQPYQGRGDQPYQGRGDQPYQGRGDQPYQGRGDQPYQGRGDQPYQGRGDQPYQGRGDQPYQGRGDQPYQGRGDQPYQGRGDQPYQGRGDQPYQGRGDQPYQGRGDQPYQGRGDQPYQGRGDQPYQGRGDQPYQGRGDQPYQGRGDQPYQGRGDQPYQGRGDQPYQGRGDQPYQ

SEQ ID NO: 150 - protein, 400 aa, Artificial Sequence
  Elastin-like polypeptide
GVGVPGVGVPGVGVPGVGVPGVGVPGVGVPGVGVPGVGVPGVGVPGVGVPGVGVPGVGVPGVGVPGVGVPGVGVPGVGVPGVGVPGVGVPGVGVPGVGVPGVGVPGVGVPGVGVPGVGVPGVGVPGVGVPGVGVPGVGVPGVGVPGVGVPGVGVPGVGVPGVGVPGVGVPGVGVPGVGVPGVGVPGVGVPGVGVPGVGVPGVGVPGVGVPGVGVPGVGVPGVGVPGVGVPGVGVPGVGVPGVGVPGVGVPGVGVPGVGVPGVGVPGVGVPGVGVPGVGVPGVGVPGVGVPGVGVPGVGVPGVGVPGVGVPGVGVPGVGVPGVGVPGVGVPGVGVPGVGVPGVGVPGVGVPGVGVPGVGVPGVGVPGVGVPGVGVPGVGVPGVGVPGVGVPGVGVPGVGVP

SEQ ID NO: 151 - protein, 720 aa, Artificial Sequence
  Elastin-like polypeptide
GRGDQPYQGRGDQPYQGRGDQPYQGRGDQPYQGRGDQPYQGRGDQPYQGRGDQPYQGRGDQPYQGRGDQPYQGRGDQPYQGRGDQPYQGRGDQPYQGRGDQPYQGRGDQPYQGRGDQPYQGRGDQPYQGRGDQPYQGRGDQPYQGRGDQPYQGRGDQPYQGRGDQPYQGRGDQPYQGRGDQPYQGRGDQPYQGRGDQPYQGRGDQPYQGRGDQPYQGRGDQPYQGRGDQPYQGRGDQPYQGRGDQPYQGRGDQPYQGRGDQPYQGRGDQPYQGRGDQPYQGRGDQPYQGRGDQPYQGRGDQPYQGRGDQPYQGRGDQPYQGVGVPGVGVPGVGVPGVGVPGVGVPGVGVPGVGVPGVGVPGVGVPGVGVPGVGVPGVGVPGVGVPGVGVPGVGVPGVGVPGVGVPGVGVPGVGVPGVGVPGVGVPGVGVPGVGVPGVGVPGVGVPGVGVPGVGVPGVGVPGVGVPGVGVPGVGVPGVGVPGVGVPGVGVPGVGVPGVGVPGVGVPGVGVPGVGVPGVGVPGVGVPGVGVPGVGVPGVGVPGVGVPGVGVPGVGVPGVGVPGVGVPGVGVPGVGVPGVGVPGVGVPGVGVPGVGVPGVGVPGVGVPGVGVPGVGVPGVGVPGVGVPGVGVPGVGVPGVGVPGVGVPGVGVPGVGVPGVGVPGVGVPGVGVPGVGVPGVGVPGVGVPGVGVPGVGVPGVGVPGVGVPGVGVPGVGVPGVGVP

SEQ ID NO: 152 - protein, 12 aa, Artificial Sequence
  linker
GKSSGSGSESKS

SEQ ID NO: 153 - protein, 14 aa, Artificial Sequence
  linker
GSTSGSGKSSEGKG

SEQ ID NO: 154 - protein, 18 aa, Artificial Sequence
  linker
GSTSGSGKSSEGSGSTKG

SEQ ID NO: 155 - protein, 18 aa, Artificial Sequence
  linker
GSTSGSGKPGSGEGSTKG

SEQ ID NO: 156 - protein, 14 aa, Artificial Sequence
  linker
EGKSSGSGSESKEF

SEQ ID NO: 157 - protein, 5 aa, Artificial Sequence
  linker
SRSSG

SEQ ID NO: 158 - protein, 5 aa, Artificial Sequence
  linker
SGSSC

SEQ ID NO: 159 - protein, 18 aa, Artificial Sequence
  linker
EGRGSLLTCGDVEENPGP

SEQ ID NO: 160 - protein, 19 aa, Artificial Sequence
  linker
ATNFSLLKQAGDVEENPGP

SEQ ID NO: 161 - protein, 20 aa, Artificial Sequence
  linker
QCTNYALLKLAGDVESNPGP

SEQ ID NO: 162 - protein, 22 aa, Artificial Sequence
  linker
VKQTLNFDLLKLAGDVESNPGP

SEQ ID NO: 163 - protein, 3 aa, Artificial Sequence
  linker
GSG

SEQ ID NO: 164 - protein, 400 aa, Artificial Sequence
  Elastin-like polypeptide
GVGVPGLGVPGVGVPGLGVPGVGVPGVGVPGLGVPGVGVPGLGVPGVGVPGVGVPGLGVPGVGVPGLGVPGVGVPGVGVPGLGVPGVGVPGLGVPGVGVPGVGVPGLGVPGVGVPGLGVPGVGVPGVGVPGLGVPGVGVPGLGVPGVGVPGVGVPGLGVPGVGVPGLGVPGVGVPGVGVPGLGVPGVGVPGLGVPGVGVPGVGVPGLGVPGVGVPGLGVPGVGVPGVGVPGLGVPGVGVPGLGVPGVGVPGVGVPGLGVPGVGVPGLGVPGVGVPGVGVPGLGVPGVGVPGLGVPGVGVPGVGVPGLGVPGVGVPGLGVPGVGVPGVGVPGLGVPGVGVPGLGVPGVGVPGVGVPGLGVPGVGVPGLGVPGVGVPGVGVPGLGVPGVGVPGLGVPGVGVP

SEQ ID NO: 165 - protein, 320 aa, Artificial Sequence
  Resilin-like polypeptide
GRGDSPYSGRGDSPYSGRGDSPYSGRGDSPYSGRGDSPYSGRGDSPYSGRGDSPYSGRGDSPYSGRGDSPYSGRGDSPYSGRGDSPYSGRGDSPYSGRGDSPYSGRGDSPYSGRGDSPYSGRGDSPYSGRGDSPYSGRGDSPYSGRGDSPYSGRGDSPYSGRGDSPYSGRGDSPYSGRGDSPYSGRGDSPYSGRGDSPYSGRGDSPYSGRGDSPYSGRGDSPYSGRGDSPYSGRGDSPYSGRGDSPYSGRGDSPYSGRGDSPYSGRGDSPYSGRGDSPYSGRGDSPYSGRGDSPYSGRGDSPYSGRGDSPYSGRGDSPYS

SEQ ID NO: 166 - protein, 96 aa, Homo sapiens
NRPPIAIVSPQFQEISLPTTSTVIDGSQSTDDDKIVQYHWEELKGPLREEKISEDTAILKLSKLVPGNYTFSLTVVDSDGATNSTTANLTVNKAVD

SEQ ID NO: 167 - protein, 122 aa, Artificial Sequence
  capture domain
GITTPEEMIEKAKGETAYLPCKFTLSPEDQGPLDIEWLISPADNQKVDQVIILYSGDKIYDDYYPDLKGRVHFTSNDLKSGDASINVTNLQLSDIGTYQCKVKKAPGVANKKIHLVVLVKPS

SEQ ID NO: 168 - protein, 43 aa, Artificial Sequence
  capture domain
GPLGSVTCKSGDFSCGGRVNRCIPQFWRCDGQVDCDNGSDEQG

SEQ ID NO: 169 - protein, 37 aa, Artificial Sequence
  capture domain
TCSQDEFRCHDGKCISRQFVCDSDRDCLDGSDEASCP

SEQ ID NO: 170 - protein, 50 aa, Artificial Sequence
  capture domain
LAEAKVLANRELDKYGVSDFYKRLINKAKTVEGVEALKLHILAALPGGWP

SEQ ID NO: 171 - protein, 59 aa, Artificial Sequence
  capture domain
VDNKFNKEQQNAFYEILHLPNLNEEQRNAFIQSLKDDPSQSANLLAEAKKLNDAQAPKG

SEQ ID NO: 172 - protein, 505 aa, Artificial Sequence
  purification matrix
MSKGPGVGVPGLGVPGVGVPGLGVPGVGVPGVGVPGLGVPGVGVPGLGVPGVGVPGVGVPGLGVPGVGVPGLGVPGVGVPGVGVPGLGVPGVGVPGLGVPGVGVPGVGVPGLGVPGVGVPGLGVPGVGVPGVGVPGLGVPGVGVPGLGVPGVGVPGVGVPGLGVPGVGVPGLGVPGVGVPGVGVPGLGVPGVGVPGLGVPGVGVPGVGVPGLGVPGVGVPGLGVPGVGVPGVGVPGLGVPGVGVPGLGVPGVGVPGVGVPGLGVPGVGVPGLGVPGVGVPGVGVPGLGVPGVGVPGLGVPGVGVPGVGVPGLGVPGVGVPGLGVPGVGVPGVGVPGLGVPGVGVPGLGVPGVGVPGVGVPGLGVPGVGVPGLGVPGVGVPGVGVPGLGVPGVGVPGLGVPGVGVPGNRPPIAIVSPQFQEISLPTTSTVIDGSQSTDDDKIVQYHWEELKGPLREEKISEDTAILKLSKLVPGNYTFSLTVVDSDGATNSTTANLTVNKAVDYPG

SEQ ID NO: 173 - protein, 530 aa, Artificial Sequence
  purification matrix
MSKGPGVGVPGLGVPGVGVPGLGVPGVGVPGVGVPGLGVPGVGVPGLGVPGVGVPGVGVPGLGVPGVGVPGLGVPGVGVPGVGVPGLGVPGVGVPGLGVPGVGVPGVGVPGLGVPGVGVPGLGVPGVGVPGVGVPGLGVPGVGVPGLGVPGVGVPGVGVPGLGVPGVGVPGLGVPGVGVPGVGVPGLGVPGVGVPGLGVPGVGVPGVGVPGLGVPGVGVPGLGVPGVGVPGVGVPGLGVPGVGVPGLGVPGVGVPGVGVPGLGVPGVGVPGLGVPGVGVPGVGVPGLGVPGVGVPGLGVPGVGVPGVGVPGLGVPGVGVPGLGVPGVGVPGVGVPGLGVPGVGVPGLGVPGVGVPGVGVPGLGVPGVGVPGLGVPGVGVPGVGVPGLGVPGVGVPGLGVPGVGVPGGITTPEEMIEKAKGETAYLPCKFTLSPEDQGPLDIEWLISPADNQKVDQVIILYSGDKIYDDYYPDLKGRVHFTSNDLKSGDASINVTNLQLSDIGTYQCKVKKAPGVANKKIHLVVLVKPSGY

SEQ ID NO: 174 - protein, 451 aa, Artificial Sequence
  purification matrix
MSKGPGVGVPGLGVPGVGVPGLGVPGVGVPGVGVPGLGVPGVGVPGLGVPGVGVPGVGVPGLGVPGVGVPGLGVPGVGVPGVGVPGLGVPGVGVPGLGVPGVGVPGVGVPGLGVPGVGVPGLGVPGVGVPGVGVPGLGVPGVGVPGLGVPGVGVPGVGVPGLGVPGVGVPGLGVPGVGVPGVGVPGLGVPGVGVPGLGVPGVGVPGVGVPGLGVPGVGVPGLGVPGVGVPGVGVPGLGVPGVGVPGLGVPGVGVPGVGVPGLGVPGVGVPGLGVPGVGVPGVGVPGLGVPGVGVPGLGVPGVGVPGVGVPGLGVPGVGVPGLGVPGVGVPGVGVPGLGVPGVGVPGLGVPGVGVPGVGVPGLGVPGVGVPGLGVPGVGVPGVGVPGLGVPGVGVPGLGVPGVGVPGGPLGSVTCKSGDFSCGGRVNRCIPQFWRCDGQVDCDNGSDEQGGY

SEQ ID NO: 175 - protein, 445 aa, Artificial Sequence
  purification matrix
MSKGPGVGVPGLGVPGVGVPGLGVPGVGVPGVGVPGLGVPGVGVPGLGVPGVGVPGVGVPGLGVPGVGVPGLGVPGVGVPGVGVPGLGVPGVGVPGLGVPGVGVPGVGVPGLGVPGVGVPGLGVPGVGVPGVGVPGLGVPGVGVPGLGVPGVGVPGVGVPGLGVPGVGVPGLGVPGVGVPGVGVPGLGVPGVGVPGLGVPGVGVPGVGVPGLGVPGVGVPGLGVPGVGVPGVGVPGLGVPGVGVPGLGVPGVGVPGVGVPGLGVPGVGVPGLGVPGVGVPGVGVPGLGVPGVGVPGLGVPGVGVPGVGVPGLGVPGVGVPGLGVPGVGVPGVGVPGLGVPGVGVPGLGVPGVGVPGVGVPGLGVPGVGVPGLGVPGVGVPGVGVPGLGVPGVGVPGLGVPGVGVPGTCSQDEFRCHDGKCISRQFVCDSDRDCLDGSDEASCPGY

SEQ ID NO: 176 - protein, 456 aa, Artificial Sequence
  purification matrix
MSKGPGVGVPGLGVPGVGVPGLGVPGVGVPGVGVPGLGVPGVGVPGLGVPGVGVPGVGVPGLGVPGVGVPGLGVPGVGVPGVGVPGLGVPGVGVPGLGVPGVGVPGVGVPGLGVPGVGVPGLGVPGVGVPGVGVPGLGVPGVGVPGLGVPGVGVPGVGVPGLGVPGVGVPGLGVPGVGVPGVGVPGLGVPGVGVPGLGVPGVGVPGVGVPGLGVPGVGVPGLGVPGVGVPGVGVPGLGVPGVGVPGLGVPGVGVPGVGVPGLGVPGVGVPGLGVPGVGVPGVGVPGLGVPGVGVPGLGVPGVGVPGVGVPGLGVPGVGVPGLGVPGVGVPGVGVPGLGVPGVGVPGLGVPGVGVPGVGVPGLGVPGVGVPGLGVPGVGVPGVGVPGLGVPGVGVPGLGVPGVGVPGLAEAKVLANRELDKYGVSDFYKRLINKAKTVEGVEALKLHILAALPGGWP

SEQ ID NO: 177 - protein, 465 aa, Artificial Sequence
  purification matrix
MSKGPGVGVPGLGVPGVGVPGLGVPGVGVPGVGVPGLGVPGVGVPGLGVPGVGVPGVGVPGLGVPGVGVPGLGVPGVGVPGVGVPGLGVPGVGVPGLGVPGVGVPGVGVPGLGVPGVGVPGLGVPGVGVPGVGVPGLGVPGVGVPGLGVPGVGVPGVGVPGLGVPGVGVPGLGVPGVGVPGVGVPGLGVPGVGVPGLGVPGVGVPGVGVPGLGVPGVGVPGLGVPGVGVPGVGVPGLGVPGVGVPGLGVPGVGVPGVGVPGLGVPGVGVPGLGVPGVGVPGVGVPGLGVPGVGVPGLGVPGVGVPGVGVPGLGVPGVGVPGLGVPGVGVPGVGVPGLGVPGVGVPGLGVPGVGVPGVGVPGLGVPGVGVPGLGVPGVGVPGVGVPGLGVPGVGVPGLGVPGVGVPGVDNKFNKEQQNAFYEILHLPNLNEEQRNAFIQSLKDDPSQSANLLAEAKKLNDAQAPKG

SEQ ID NO: 178 - protein, 385 aa, Artificial Sequence
  purification matrix
MSKGPGRGDSPYSGRGDSPYSGRGDSPYSGRGDSPYSGRGDSPYSGRGDSPYSGRGDSPYSGRGDSPYSGRGDSPYSGRGDSPYSGRGDSPYSGRGDSPYSGRGDSPYSGRGDSPYSGRGDSPYSGRGDSPYSGRGDSPYSGRGDSPYSGRGDSPYSGRGDSPYSGRGDSPYSGRGDSPYSGRGDSPYSGRGDSPYSGRGDSPYSGRGDSPYSGRGDSPYSGRGDSPYSGRGDSPYSGRGDSPYSGRGDSPYSGRGDSPYSGRGDSPYSGRGDSPYSGRGDSPYSGRGDSPYSGRGDSPYSGRGDSPYSGRGDSPYSGRGDSPYSGVDNKFNKEQQNAFYEILHLPNLNEEQRNAFIQSLKDDPSQSANLLAEAKKLNDAQAPKG

SEQ ID NO: 179 - protein, 58 aa, Staphylococcus aureus [sequence omitted]
